(19) United States
(12) Patent Application Publication
(10) Pub. No.: US 2025/0230441 A1
(43) Pub. Date: Jul. 17, 2025

(54) Nucleic acids for inhibiting expression of MASP-2 in a cell

(71) Applicant: SILENCE THERAPEUTICS GMBH, Berlin (DE)

(72) Inventors: Eliot Morrison, Berlin (DE); Sibylle Dames, Berlin (DE); Maciej Czajkowski, Berlin (DE); Verena Aumiller, Berlin (DE); Timo Johannssen, Berlin (DE)

(21) Appl. No.: 18/837,538

(22) PCT Filed: Feb. 10, 2023
(86) PCT No.: PCT/EP2023/053298

§ 371 Date: Aug. 9, 2024

(30) Foreign Application Priority Data
Feb. 10, 2022 (EP) 22156214.3

(51) Int. Cl. C12N 15/113

(52) U.S. Cl. CPC C12N 15/1137; C12N 2310/14; C12N 2310/321; C12N 2310/335; C12N 2310/351

(57) ABSTRACT

The invention relates to double-stranded nucleic acid molecules that interfere with or inhibit mannan-binding lectin serine protease 2 (MASP-2) gene expression. It further relates to therapeutic uses of such inhibition such as for the treatment of diseases and disorders associated with complement pathway deregulation, particularly of the Lectin pathway, and/or with over-activation or with ectopic expression or localisation or accumulation, of MASP-2 in the body.

### FIELD OF THE INVENTION

[0001] The invention relates to double-stranded nucleic acid molecules that interfere with or inhibit mannan-binding lectin serine protease 2 (MASP-2) gene expression. It further relates to therapeutic uses of such inhibition such as for the treatment of diseases and disorders associated with complement pathway deregulation, particularly of the lectin pathway, and/or with over-activation or with ectopic expression or localisation or accumulation, of MASP-2 in the body.

### BACKGROUND

[0002] Double-stranded RNAs (dsRNA) able to bind through complementary base pairing to expressed mRNAs have been shown to block gene expression (Fire et al., 1998, Nature. 1998 Feb. 19; 391(6669):806-11 and Elbashir et al., 2001, Nature. 2001 May 24; 411(6836):494-8) by a mechanism that has been termed “RNA interference (RNAi)”. Short dsRNAs direct gene specific, post transcriptional silencing in many organisms, including vertebrates, and have become a useful tool for studying gene function. RNAi is mediated by the RNA induced silencing complex (RISC), a sequence specific, multi component nuclease that degrades messenger RNAs having sufficient complementary or homology to the silencing trigger loaded into the RISC complex. Interfering RNAs such as siRNAs, antisense RNAs, and micro RNAs, are oligonucleotides that prevent the formation of proteins by gene silencing, i.e., inhibiting gene translation of the protein through degradation of mRNA molecules. Gene silencing agents are becoming increasingly important for therapeutic applications in medicine.

[0003] According to Watts and Corey in the Journal of Pathology (2012; Vol 226, p 365-379), there are algorithms that can be used to design nucleic acid silencing triggers, but all of these have severe limitations. It may take various experimental methods to identify potent siRNAs, as algorithms do not take into account factors such as tertiary structure of the target mRNA or the involvement of RNA binding proteins. Therefore, the discovery of a potent nucleic acid silencing trigger with minimal off-target effects is a complex process. For the pharmaceutical development of these highly charged molecules, it is necessary that they can be synthesised economically, distributed to target tissues, enter cells and function within acceptable limits of toxicity.

[0004] The complement system or pathway is part of the innate immune system of host defence against invading pathogens. It mainly consists of a number of proteins that circulate in the bloodstream in the form of precursors. Most of the proteins that form the complement system, including the complement component protein C3 (also referred to herein simply as C3), are largely synthesised and secreted into the bloodstream by hepatocytes in the liver. Activation of the system leads to inflammatory responses resulting in phagocyte attraction and opsonization and consequently clearance of pathogens, immune complexes and cellular debris (Janeway's Immunobiology 9th Edition). The complement system consists of 3 pathways (Classical, Lectin and Alternative pathways), which all converge at the formation of so-called complement component 3 convertase enzyme complexes. These enzyme complexes cleave the complement component C3 protein into C3a and C3b. Once cleaved, C3b forms part of a complex that in turn cleaves C5 into C5a and C5b. After cleavage, C5b is one of the key components of the main complement pathway effectors, the membrane attack complex. C3 is therefore a key component of the complement system activation pathway.

[0005] Complement Factor B (CFB or “factor B”) is involved in activation of the Alternative pathway. Binding of CFB to C3b (e.g., on a cell surface) renders CFB susceptible to cleavage by Factor D, forming the serine protease C3Bb, which is itself a C3 convertase, leading to an amplification loop for C3 activation. CFB is primarily synthesised in the liver, as well as in low levels at several extrahepatic sites.

[0006] The mannan-binding lectin serine protease 2 (also known as mannose-binding protein-associated serine protease 2, or as mannan-binding lectin serine peptidase 2, or MBL associated serine protease 2) (MASP-2) gene, encoding the protein MASP-2, is the main enzyme involved in the activation of lectin pathway of the complement system. MASP-2 can also activate the Alternative pathway of complement system through a C4/C2 bypass route that leads to MASP-2-dependent activation of C3 by an unknown mechanism. The MASP-2 gene encodes a member of the peptidase S1 family of serine proteases. The encoded preproprotein is proteolytically processed to generate A and B chains that heterodimerize to form the mature protease. This protease cleaves complement components C2 and C4 to generate C3 convertase in the lectin pathway of the complement system. The encoded protease also plays a role in the coagulation cascade through cleavage of prothrombin to form thrombin. Alternative splicing results in multiple transcript variants, at least one of which encodes an isoform that is proteolytically processed.

[0007] The MASP-2 gene encodes a 76 kDa serine protease, MASP-2 (long isoform), which is highly expressed in the liver, and a 19 kDa alternative splice product, Map19 (short isoform), which is present in plasma.

[0008] Several diseases are associated with aberrant acquired or genetic activation of the complement pathway as well as with aberrant or over-expression of MASP-2.

[0009] There are currently only few treatments for complement system mediated diseases, disorders and syndromes. The monoclonal humanized antibody Eculizumab is one of them. It is known to bind complement protein C5, thereby blocking the membrane attack complex at the end of the complement cascade (Hillmen et al., 2006 NEJM). However, only a subset of patients suffering from complement system mediated diseases respond to Eculizumab therapy. There is thus a high unmet need for medical treatments of complement mediated or associated diseases. Inhibiting expression of MASP-2 presents a promising therapeutic strategy for many complement-mediated diseases. Targeting of MASP-2 expression or activity, e.g., via antisense oligonucleotides or inhibitors, has been proposed as a potential therapeutic strategy for various complement-mediated conditions including rheumatoid arthritis (Holers et al., Front Immunol. 2020 Feb. 21; 11:201), IgA nephropathy, lupus nephritis (Lafayette et al., Kidney Int Rep. 2020 Aug. 13; 5(11):2032-2041), thrombotic microangiopathy and atypical hemolytic uremic syndrome (Elhadad et al., Clin Exp Immunol. 2021 January; 203(1):96-104; Young et al., Bone Marrow Transplant. 2021 August; 56(8):1805-1817). It has been suggested to investigate MASP-2 inhibition (via antibody) to treat pneumococcal meningitis (Kasanmoentalib et al., J Neuroinflammation. 2017 Apr. 6; 14(1):77) and coronavirus infection (Flude et al., Viruses, 2021 Feb. 17; 13(2):312).

[0010] WO2012139081A2, Lafayette et al. (Kidney Int Rep. 2020 Aug. 13; 5(11):2032-2041), Young et al. (Bone Marrow Transplant. 2021 August; 56(8):1805-1817 and Elhadad et al. (Clin Exp Immunol. 2021 January; 203(1):96-104) describe MASP-2 antibodies (e.g., narsoplimab) for treating conditions with MASP-2 dependent complement activation. US20200032270A1 and WO2021168148A1 describe double-stranded RNA agents targeting MASP-2 gene.

### SUMMARY OF THE INVENTION

[0011] One aspect of the invention is a double-stranded nucleic acid for inhibiting expression of mannan-binding lectin serine protease 2 (MASP-2), wherein the nucleic acid comprises a first strand and a second strand, wherein the unmodified equivalent of the first strand sequence comprises a sequence of at least 15 nucleotides differing by no more than 3 nucleotides from any one of the first strand sequences shown in Table 5a.

[0012] The unmodified equivalent of the first strand sequence may, for example, comprise a sequence of at least 15 nucleotides differing by no more than 3 nucleotides from any one of the first strand sequences listed in Table 1.

[0013] The nucleic acids described herein are thus double-stranded nucleic acids capable of inhibiting expression of MASP-2, preferably in a cell, and may find use as a therapeutic agent or diagnostic agent, e.g., in associated diagnostic or therapeutic methods. The nucleic acid comprises or consists of a first strand and a second strand, and the first strand typically comprises sequences sufficiently complementary to MASP-2 mRNA, so as to mediate RNA interference.

[0014] One aspect relates to a composition comprising a nucleic acid as disclosed herein and a solvent (preferably water) and/or a delivery vehicle and/or a physiologically acceptable excipient and/or a carrier and/or a salt and/or a diluent and/or a buffer and/or a preservative.

[0015] One aspect relates to a composition comprising a nucleic acid as disclosed herein and a further therapeutic agent selected from e.g., an oligonucleotide, a small molecule, a monoclonal antibody, a polyclonal antibody and a peptide.

[0016] One aspect relates to a nucleic acid or a composition comprising it as disclosed herein for use as a therapeutic agent or diagnostic agent, e.g., in associated methods.

[0017] One aspect relates to a nucleic acid or a composition comprising it as disclosed herein for use in the prophylaxis or treatment of a disease, disorder or syndrome.

[0018] One aspect relates to the use of a nucleic acid or a composition comprising it as disclosed herein in the prophylaxis or treatment of a disease, disorder or syndrome.

[0019] One aspect relates to the use of a nucleic acid or a composition comprising it as disclosed herein in the preparation of a medicament for the prophylaxis or treatment of a disease, disorder or syndrome.

[0020] One aspect relates to a method of prophylaxis or treatment of a disease, disorder or syndrome comprising administering a pharmaceutically effective dose or amount of a nucleic acid or composition comprising it as disclosed herein to an individual in need of treatment, preferably wherein the nucleic acid or composition is administered to the subject subcutaneously, intravenously or by oral, rectal, pulmonary, intramuscular or intraperitoneal administration.

### DETAILED DESCRIPTION OF THE INVENTION

[0021] The present invention relates to a nucleic acid which is double-stranded, and which comprises a sequence substantially homologous to an expressed RNA transcript of MASP-2, and compositions thereof. These nucleic acids, conjugates thereof, and compositions comprising them, may be used in the prophylaxis and treatment of a variety of diseases, disorders and syndromes in which reduced expression of the MASP-2 gene product is desirable.

[0022] A first aspect of the invention is a double-stranded nucleic acid for inhibiting expression of MASP-2, preferably in a cell, wherein the nucleic acid comprises a first strand and a second strand, wherein the unmodified equivalent of the first strand sequence comprises a sequence of at least 15 nucleotides differing by no more than 3 nucleotides from any one of the first strand sequences shown in Table 5a. These nucleic acids among others have the advantage of being active in various species that are relevant for pre-clinical and clinical development and/or of having few relevant off-target effects. Having few relevant off-target effects means that a nucleic acid specifically inhibits the intended target and does not significantly inhibit other genes or inhibits only one or few other genes at a therapeutically acceptable level.

[0023] For example, the unmodified equivalent of the first strand sequence may comprise a sequence of at least 15 nucleotides differing by no more than 3 nucleotides from any one of the first strand sequences listed in Table 1:

TABLE 1

| First strand | Second strand |
|---|---|
| sequence (SEQ ID No.) | sequence (SEQ ID No.) |
| 147 | 148 |
| 385 | 178 |
| 199 | 200 |
| 235 | 236 |
| 237 | 238 |
| 245 | 246 |
| 386 | 310 |
| 387 | 346 |
| 388 | 382 |
| 389 | 384 |
| 289 | 290 |
| 309 | 310 |
| 381 | 382 |

[0024] Preferably, the unmodified equivalent of the first strand sequence comprises a sequence of at least 16, more preferably at least 17, yet more preferably at least 18 and most preferably all 19 nucleotides differing by no more than 3 nucleotides, preferably by no more than 2 nucleotides, more preferably by no more than 1 nucleotide, and most preferably not differing by any nucleotide from any one of the first strand sequences shown in Table 1 or in Table 5a.

[0025] For example, the unmodified equivalent of the first strand sequence may comprise a sequence of at least 16, more preferably at least 17, yet more preferably at least 18 and most preferably all 19 nucleotides differing by no more than 3 nucleotides, preferably by no more than 2 nucleotides, more preferably by no more than 1 nucleotide, and most preferably not differing by any nucleotide from any one of the first strand sequences listed in Table 1 or in Table 5a.

[0026] Preferably, the unmodified equivalent of the first strand sequence of the nucleic acid consists of one of the first strand sequences shown in Table 1 or in Table 5a. The sequence may however be modified by a number of nucleic acid modifications that do not change the identity of the nucleotide. For example, modifications of the backbone or sugar residues of the nucleic acid do not change the identity of the nucleotide because the base itself remains the same as in the reference sequence.

[0027] For example, the unmodified equivalent of the first strand sequence of the nucleic acid may consist of one of the first strand sequences shown in Table 1 or in Table 5a, optionally modified by one or more of said nucleic acid modifications.

[0028] A nucleic acid that comprises a sequence according to a reference sequence herein means that the nucleic acid comprises a sequence of contiguous nucleotides in the order as defined in the reference sequence.

[0029] When reference is made herein to a reference sequence comprising, consisting essentially of, or consisting of nucleotides, this reference is not limited to the sequence with unmodified nucleotides. The same reference also encompasses the same nucleotide sequence in which one, several, such as two, three, four, five, six, seven or more, including all, nucleotides are modified by modifications such as 2′-OMe, 2′-F, a ligand, a linker, a 3′ end or 5′ end modification or any other modification. It also refers to sequences in which two or more nucleotides are linked to each other by the natural phosphodiester linkage or by any other linkage such as a phosphorothioate or a phosphorodithioate linkage.

[0030] A double-stranded nucleic acid is a nucleic acid in which the first strand and the second strand hybridise to each other over at least part of their lengths and are therefore capable of forming a duplex region under physiological conditions, such as in PBS at 37° C. at a concentration of 1 μM of each strand. The first and second strand are preferably able to hybridise to each other and therefore to form a duplex region over a region of at least 15 nucleotides, preferably 16, 17, 18 or 19 nucleotides. This duplex region comprises nucleotide base parings between the two strands, preferably based on Watson-Crick base pairing and/or wobble base pairing (such as GU base pairing). All the nucleotides of the two strands within a duplex region do not have to base pair to each other to form a duplex region. A certain number of mismatches, deletions or insertions between the nucleotide sequences of the two strands are acceptable. Overhangs on either end of the first or second strand or unpaired nucleotides at either end of the double-stranded nucleic acid are also possible. The double-stranded nucleic acid is preferably a double-stranded nucleic acid under physiological conditions, and preferably has a melting temperature (Tm) of 45° C. or more, preferably 50° C. or more, and more preferably 55° C. or more for example in PBS at a concentration of 1 μM of each strand.

[0031] A stable double-stranded nucleic acid under physiological conditions is a double-stranded nucleic acid that has a Tm of 45° C. or more, preferably 50° C. or more, and more preferably 55° C. or more, for example in PBS at a concentration of 1 μM of each strand.

[0032] The first strand and the second strand are preferably capable of forming a duplex region (i.e., are complementary to each other) over i) at least a portion of their lengths, preferably over at least 15 nucleotides of both of their lengths, ii) over the entire length of the first strand, iii) over the entire length of the second strand or iv) over the entire length of both the first and the second strand. Strands being complementary to each other over a certain length means that the strands are able to base pair to each other, either via Watson-Crick or wobble base pairing, over that length. Each nucleotide of the length does not necessarily have to be able to base pair with its counterpart in the other strand over the entire given length as long as a stable double-stranded nucleotide under physiological conditions can be formed. It is however, preferred, in certain embodiments, if each nucleotide of the length can base pair with its counterpart in the other strand over the entire given length.

[0033] A certain number of mismatches, deletions or insertions between the first strand and the target sequence, or between the first strand and the second strand can be tolerated in the context of the nucleic acids according to the present invention and even have the potential in certain cases to increase RNA interference (e.g., inhibition) activity.

[0034] The inhibition activity of the nucleic acids according to the present invention relies on the formation of a duplex region between all or a portion of the first strand and a portion of a target nucleic acid. The portion of the target nucleic acid that forms a duplex region with the first strand, defined as beginning with the first base pair formed between the first strand and the target sequence and ending with the last base pair formed between the first strand and the target sequence, inclusive, is the target nucleic acid sequence or simply, target sequence. The duplex region formed between the first strand and the second strand need not be the same as the duplex region formed between the first strand and the target sequence. That is, the second strand may have a sequence different from the target sequence; however, the first strand must be able to form a duplex structure with both the second strand and the target sequence, at least under physiological conditions.

[0035] The complementarity between the first strand and the target sequence may be perfect (i.e., 100% identity with no nucleotide mismatches or insertions or deletions in the first strand as compared to the target sequence).

[0036] The complementarity between the first strand and the target sequence may not be perfect. The complementarity may be from about 70% to about 100%. More specifically, the complementarity may be at least 70%, 80%, 85%, 90% or 95% and intermediate values.

[0037] The identity between the first strand and the complementary sequence of the target sequence may range from about 75% to about 100%. More specifically, the complementarity may be at least 75%, 80%, 85%, 90% or 95% and intermediate values, provided a nucleic acid is capable of reducing or inhibiting the expression of MASP-2.

[0038] A nucleic acid having less than 100% complementarity between the first strand and the target sequence may be able to reduce the expression of MASP-2 to the same level as a nucleic acid having perfect complementarity between the first strand and target sequence. Alternatively, it may be able to reduce expression of MASP-2 to a level that is 15%, 20%, 25%, 30%, 35%, 40%, 45%, 50%, 55%, 60%, 65%, 70%, 75%, 80%, 85%, 90%, 95%, 98%, 99% or 100% of the level of reduction achieved by the nucleic acid with perfect complementarity.

[0039] A nucleic acid of the present disclosure may be an isolated nucleic acid.

[0040] A nucleic acid of the present disclosure may be a nucleic acid wherein:
[0041] (a) the unmodified equivalent of the first strand sequence comprises a sequence differing by no more than 3 nucleotides from any one of the first strand sequences of Table 5a, and optionally wherein the unmodified equivalent of the second strand sequence comprises a sequence differing by no more than 3 nucleotides from the corresponding second strand sequence of Table 5a;
[0042] (b) the unmodified equivalent of the first strand sequence comprises a sequence differing by no more than 2 nucleotides from any one of the first strand sequences of Table 5a, and optionally wherein the unmodified equivalent of the second strand sequence comprises a sequence differing by no more than 2 nucleotides from the corresponding second strand sequence of Table 5a;
[0043] (c) the unmodified equivalent of the first strand sequence comprises a sequence differing by no more than 1 nucleotide from any one of the first strand sequences of Table 5a, and optionally wherein the unmodified equivalent of the second strand sequence comprises a sequence differing by no more than 1 nucleotide from the corresponding second strand sequence of Table 5a;
[0044] (d) the unmodified equivalent of the first strand sequence comprises a sequence corresponding to nucleotides 2 to 17 from the 5′ end of any one of the first strand sequences with a given SEQ ID No. shown in Table 5a, and optionally wherein the unmodified equivalent of the second strand sequence comprises a sequence corresponding to nucleotides 2 to 17 from the 5′ end of the corresponding second strand sequence with a given SEQ ID No. shown in Table 5a;
[0045] (e) the unmodified equivalent of the first strand sequence comprises a sequence corresponding to nucleotides 2 to 18 from the 5′ end of any one of the first strand sequences with a given SEQ ID No. shown in Table 5a, and optionally wherein the unmodified equivalent of the second strand sequence comprises a sequence corresponding to nucleotides 2 to 18 from the 5′ end of the corresponding second strand sequence with a given SEQ ID No. shown in Table 5a;
[0046] (f) the unmodified equivalent of the first strand sequence comprises a sequence corresponding to nucleotides 2 to 19 from the 5′ end of any one of the first strand sequences with a given SEQ ID No. shown in Table 5a, and optionally wherein the unmodified equivalent of the second strand sequence comprises a sequence corresponding to nucleotides 2 to 19 from the 5′ end of the corresponding second strand sequence with a given SEQ ID No. shown in Table 5a;
[0047] (g) the unmodified equivalent of the first strand sequence comprises a sequence corresponding to nucleotides 2 to 19 from the 5′ end of any one of the first strand sequences with a given SEQ ID No. shown in Table 5a, and optionally wherein the unmodified equivalent of the second strand sequence comprises a sequence corresponding to nucleotides 1 to 18 from the 5′ end of the corresponding second strand sequence with a given SEQ ID No. shown in Table 5a;
[0048] (h) the unmodified equivalent of the first strand sequence comprises a sequence of any one of the first strand sequences with a given SEQ ID No. shown in Table 5a, and optionally wherein the unmodified equivalent of the second strand sequence comprises a sequence of the corresponding second strand sequence with a given SEQ ID No. shown in Table 5a;
[0049] (i) the unmodified equivalent of the first strand sequence consists essentially of any one of the first strand sequences with a given SEQ ID No. shown in Table 5a, and optionally wherein the unmodified equivalent of the second strand sequence consists essentially of the sequence of the corresponding second strand sequence with a given SEQ ID No. shown in Table 5a;
[0050] (j) the unmodified equivalent of the first strand sequence consists of any one of the first strand sequences with a given SEQ ID No. shown in Table 5a, and optionally wherein the unmodified equivalent of the second strand sequence consists of the sequence of the corresponding second strand sequence with a given SEQ ID No. shown in Table 5a;
[0051] (k) the unmodified equivalent of the first strand sequence consists of a sequence corresponding to nucleotides 1 to 19 from the 5′ end of any one of the first strand sequences with a given SEQ ID No. shown in Table 5a, wherein said unmodified equivalent of the first strand sequence further consists of 1 (nucleotide 20 counted from the 5′end), 2 (nucleotides 20 and 21), 3 (nucleotides 20, 21 and 22), 4 (nucleotides 20, 21, 22 and 23), 5 (nucleotides 20, 21, 22, 23 and 24) or 6 (nucleotides 20, 21, 22, 23, 24 and 25) additional nucleotide(s) at the 3′end of any one of the first strand sequences with a given SEQ ID No. shown in Table 5a, and optionally wherein the unmodified equivalent of the second strand sequence comprises or consists essentially of or consists of a sequence of the corresponding second strand sequence with a given SEQ ID No. shown Table 5a;
[0052] (l) the unmodified equivalent of the first strand sequence consists of a sequence corresponding to nucleotides 1 to 19 from the 5′ end of any one of the first strand sequences with a given SEQ ID No. shown in Table 5a, wherein said unmodified equivalent of the first strand sequence further consists of 1 (nucleotide 20 counted from the 5′end), 2 (nucleotides 20 and 21), 3 (nucleotides 20, 21 and 22), 4 (nucleotides 20, 21, 22 and 23), 5 (nucleotides 20, 21, 22, 23 and 24) or 6 (nucleotides 20, 21, 22, 23, 24 and 25) additional nucleotide(s) at the 3′end of any one of the first strand sequences with a given SEQ ID No. shown in Table 5a, and wherein said unmodified equivalent of the first strand sequence consists of a contiguous region of from 17-25 nucleotides in length, preferably of from 18-24 nucleotides in length, complementary to the MASP-2 transcript of SEQ ID NO. 821; and optionally wherein the unmodified equivalent of the second strand sequence comprises or consists essentially of or consists of a sequence of the corresponding second strand sequence with a given SEQ ID No. shown in Table 5a;
[0053] (m) unmodified equivalent of the first strand and the unmodified equivalent of the second strand of any one of the nucleic acid molecules of subsections (a) to (l) above are present on a single strand wherein the unmodified equivalent of the first strand and the unmodified equivalent of the second strand are able to hybridise to each other and to thereby form a double-stranded nucleic acid with a duplex region of 17, 18, 19, 20, 21, 22, 23, 24 or 25 nucleotides in length; or
[0054] (n) the unmodified equivalent of the first strand and the unmodified equivalent of the second strand of any one of the nucleic acid molecules of subsections (a) to (l) above are on two separate strands that are able to hybridise to each other and to thereby form a double-stranded nucleic acid with a duplex region of 17, 18, 19, 20, 21, 22, 23, 24 or 25 nucleotides in length.

[0055] For example, a nucleic acid of the present disclosure may be a nucleic acid wherein:
[0056] (a) the unmodified equivalent of the first strand sequence comprises a sequence differing by no more than 3 nucleotides from any one of the first strand sequences of Table 1, and optionally wherein the unmodified equivalent of the second strand sequence comprises a sequence differing by no more than 3 nucleotides from the corresponding second strand sequence of Table 1;
[0057] (b) the unmodified equivalent of the first strand sequence comprises a sequence differing by no more than 2 nucleotides from any one of the first strand sequences of Table 1, and optionally wherein the unmodified equivalent of the second strand sequence comprises a sequence differing by no more than 2 nucleotides from the corresponding second strand sequence of Table 1;
[0058] (c) the unmodified equivalent of the first strand sequence comprises a sequence differing by no more than 1 nucleotide from any one of the first strand sequences of Table 1, and optionally wherein the unmodified equivalent of the second strand sequence comprises a sequence differing by no more than 1 nucleotide from the corresponding second strand sequence of Table 1;
[0059] (d) the unmodified equivalent of the first strand sequence comprises a sequence corresponding to nucleotides 2 to 17 from the 5′ end of any one of the first strand sequences with a given SEQ ID No. shown in Table 1, and optionally wherein the unmodified equivalent of the second strand sequence comprises a sequence corresponding to nucleotides 2 to 17 from the 5′ end of the corresponding second strand sequence with a given SEQ ID No. shown in Table 1;
[0060] (e) the unmodified equivalent of the first strand sequence comprises a sequence corresponding to nucleotides 2 to 18 from the 5′ end of any one of the first strand sequences with a given SEQ ID No. shown in Table 1, and optionally wherein the unmodified equivalent of the second strand sequence comprises a sequence corresponding to nucleotides 2 to 18 from the 5′ end of the corresponding second strand sequence with a given SEQ ID No. shown in Table 1;
[0061] (f) the unmodified equivalent of the first strand sequence comprises a sequence corresponding to nucleotides 2 to 19 from the 5′ end of any one of the first strand sequences with a given SEQ ID No. shown in Table 1, and optionally wherein the unmodified equivalent of the second strand sequence comprises a sequence corresponding to nucleotides 2 to 19 from the 5′ end of the corresponding second strand sequence with a given SEQ ID No. shown in Table 1;
[0062] (g) the unmodified equivalent of the first strand sequence comprises a sequence corresponding to nucleotides 2 to 19 from the 5′ end of any one of the first strand sequences with a given SEQ ID No. shown in Table 1, and optionally wherein the unmodified equivalent of the second strand sequence comprises a sequence corresponding to nucleotides 1 to 18 from the 5′ end of the corresponding second strand sequence with a given SEQ ID No. shown in Table 1;
[0063] (h) the unmodified equivalent of the first strand sequence comprises a sequence of any one of the first strand sequences with a given SEQ ID No. shown in Table 1, and optionally wherein the unmodified equivalent of the second strand sequence comprises a sequence of the corresponding second strand sequence with a given SEQ ID No. shown in Table 1;
[0064] (i) the unmodified equivalent of the first strand sequence consists of any one of the first strand sequences with a given SEQ ID No. shown in Table 1, and optionally wherein the unmodified equivalent of the second strand sequence consists of the sequence of the corresponding second strand sequence with a given SEQ ID No. shown in Table 1;
[0065] (j) the unmodified equivalent of the first strand sequence consists essentially of any one of the first strand sequences with a given SEQ ID No. shown in Table 1, and optionally wherein the unmodified equivalent of the second strand sequence consists essentially of the sequence of the corresponding second strand sequence with a given SEQ ID No. shown in Table 1;
[0066] (k) the unmodified equivalent of the first strand sequence consists of a sequence corresponding to nucleotides 1 to 19 from the 5′ end of any one of the first strand sequences with a given SEQ ID No. shown in Table 1, wherein said unmodified equivalent of the first strand sequence further consists of 1 (nucleotide 20 counted from the 5′end), 2 (nucleotides 20 and 21), 3 (nucleotides 20, 21 and 22), 4 (nucleotides 20, 21, 22 and 23), 5 (nucleotides 20, 21, 22, 23 and 24) or 6 (nucleotides 20, 21, 22, 23, 24 and 25) additional nucleotide(s) at the 3′end of any one of the first strand sequences with a given SEQ ID No. shown in Table 1, and optionally wherein the unmodified equivalent of the second strand sequence comprises or consists essentially of or consists of a sequence of the corresponding second strand sequence with a given SEQ ID No. shown Table 1;
[0067] (l) the unmodified equivalent of the first strand sequence consists of a sequence corresponding to nucleotides 1 to 19 from the 5′ end of any one of the first strand sequences with a given SEQ ID No. shown in Table 1, wherein said unmodified equivalent of the first strand sequence further consists of 1 (nucleotide 20 counted from the 5′end), 2 (nucleotides 20 and 21), 3 (nucleotides 20, 21 and 22), 4 (nucleotides 20, 21, 22 and 23), 5 (nucleotides 20, 21, 22, 23 and 24) or 6 (nucleotides 20, 21, 22, 23, 24 and 25) additional nucleotide(s) at the 3′end of any one of the first strand sequences with a given SEQ ID No. shown in Table 1, and wherein said unmodified equivalent of the first strand sequence consists of a contiguous region of from 17-25 nucleotides in length, preferably of from 18-24 nucleotides in length, complementary to the MASP-2 transcript of SEQ ID NO. 821; and optionally wherein the unmodified equivalent of the second strand sequence comprises or consists essentially of or consists of a sequence of the corresponding second strand sequence with a given SEQ ID No. shown in Table 1;
[0068] (m) unmodified equivalent of the first strand and the unmodified equivalent of the second strand of any one of the nucleic acid molecules of subsections (a) to (l) above are present on a single strand wherein the unmodified equivalent of the first strand and the unmodified equivalent of the second strand are able to hybridise to each other and to thereby form a double-stranded nucleic acid with a duplex region of 17, 18, 19, 20, 21, 22, 23, 24 or 25 nucleotides in length; or
[0069] (n) the unmodified equivalent of the first strand and the unmodified equivalent of the second strand of any one of the nucleic acid molecules of subsections (a) to (l) above are on two separate strands that are able to hybridise to each other and to thereby form a double-stranded nucleic acid with a duplex region of 17, 18, 19, 20, 21, 22, 23, 24 or 25 nucleotides in length.

[0070] By a “corresponding” second strand is meant a second strand present in the same duplex as a given first strand in Table 5a, 5b or 5c, or listed as a corresponding second strand sequence in Table 1 or Table 2, as the case may be. That is to say, a first strand and its corresponding second strand are designated as the “A” and “B” strands respectively of a duplex having a given Duplex ID in Table 5a, 5b or 5c, or are described as such in Tables 1 and 2.

[0071] In one aspect, if the 5′-most nucleotide of the first strand is a nucleotide other than A or U, this nucleotide is replaced by an A or U. Preferably, if the 5′-most nucleotide of the first strand is a nucleotide other than U, this nucleotide is replaced by U, and more preferably by U with a 5′ vinylphosphonate.

[0072] When a nucleic acid of the invention does not comprise the entire sequence of a reference first strand and/or second strand sequence (as for example given in Tables 1, 2, 5a, 5b or 5c), or one or both strands differ from the corresponding reference sequence by one, two or three nucleotides, this nucleic acid preferably retains at least 30%, more preferably at least 50%, more preferably at least 70%, more preferably at least 80%, even more preferably at least 90%, yet more preferably at least 95% and most preferably at least 100% of the MASP-2 inhibition activity compared to the inhibition activity of the corresponding nucleic acid that comprises the entire first strand and second strand reference sequences in a comparable experiment.

[0073] Nucleic acids that are capable of hybridising under physiological conditions are nucleic acids that are capable of forming base pairs, preferably Watson-Crick or wobble base-pairs, between at least a portion of the opposed nucleotides in the strands so as to form at least a duplex region. Such a double-stranded nucleic acid is preferably a stable double-stranded nucleic acid under physiological conditions (for example in PBS at 37° C. at a concentration of 1 μM of each strand), meaning that under such conditions, the two strands stay hybridised to each other. The Tm of the double-stranded nucleotide is preferably 45° C. or more, preferably 50° C. or more and more preferably 55° C. or more.

[0074] One aspect of the present invention relates to a nucleic acid for inhibiting expression of MASP-2, wherein the nucleic acid comprises a first sequence of at least 15, preferably at least 16, more preferably at least 17, yet more preferably at least 18 and most preferably all nucleotides differing by no more than 3 nucleotides, preferably no more than 2 nucleotides, more preferably no more than 1 nucleotide and most preferably not differing by any nucleotide from any of the first strand unmodified equivalent sequences of Table 5a, or of Table 1, the first sequence being able to hybridise to a target gene transcript (such as an mRNA) under physiological conditions. Preferably, the nucleic acid further comprises a second sequence of at least 15, preferably at least 16, more preferably at least 17, yet more preferably at least 18 and most preferably all nucleotides differing by no more than 3 nucleotides, preferably no more than 2 nucleotides, more preferably no more than 1 nucleotide and most preferably not differing by any nucleotide from any of the corresponding second strand unmodified equivalent sequences of Table 5a, or of Table 1, the second sequence being able to hybridise to the first sequence under physiological conditions and preferably the nucleic acid being an siRNA that is capable of inhibiting MASP-2 expression via the RNAi pathway.

[0075] One aspect relates to any double-stranded nucleic acid as disclosed in Tables 1, 2, 5a, 5b or 5c, each of which may be referred to by a given Duplex ID, preferably for inhibiting expression of MASP-2, provided that the double-stranded nucleic acid is able to inhibit expression of MASP-2. These nucleic acids are all siRNAs.

[0076] One aspect relates to a double-stranded nucleic acid that is capable of inhibiting expression of MASP-2, preferably in a cell, for use as a therapeutic or diagnostic agent, e.g., in associated therapeutic or diagnostic methods, wherein the nucleic acid preferably comprises or consists of a first strand and a second strand and preferably wherein the first strand comprises sequences sufficiently complementary to a MASP-2 mRNA so as to mediate RNA interference.

[0077] The nucleic acids described herein may be capable of inhibiting the expression of MASP-2. Inhibition may be complete, i.e., 0% remaining expression. Inhibition of MASP-2 expression may be partial, i.e., it may be 15%, 20%, 30%, 40%, 50%, 60%, 70%, 75%, 80%, 85%, 90%, 95% or more, or intermediate values of inhibition of the level of MASP-2 expression in the absence of a nucleic acid of the invention. The level of inhibition may be measured by comparing a treated sample with an untreated sample or with a sample treated with a control such as for example a siRNA that does not target MASP-2. Inhibition may be measured by measuring MASP-2 mRNA and/or protein levels or levels of a biomarker or indicator that correlates with MASP-2 presence or activity. It may be measured in cells that may have been treated in vitro with a nucleic acid described herein. Alternatively, or in addition, inhibition may be measured in cells, such as hepatocytes, or tissue, such as liver tissue, or an organ, such as the liver, or in a body fluid such as blood, serum, lymph or any other body part or fluid that has been taken from a subject previously treated with a nucleic acid disclosed herein. Preferably, inhibition of MASP-2 expression is determined by comparing the MASP-2 mRNA level measured in MASP-2-expressing cells after 24- or 48-hours in vitro treatment with a double-stranded RNA disclosed herein under ideal conditions (see the examples for appropriate concentrations and conditions) to the MASP-2 mRNA level measured in control cells that were untreated or mock treated or treated with a control double-stranded RNA under the same conditions.

[0078] One aspect of the present invention relates to a nucleic acid, wherein the first strand and the second strand are present on a single strand of a nucleic acid that loops around so that the first strand and the second strand are able to hybridise to each other and to thereby form a double-stranded nucleic acid with a duplex region.

[0079] Preferably, the first strand and the second strand of the nucleic acid are separate strands. The two separate strands are preferably each 17-25 nucleotides in length, more preferably 18-25 nucleotides in length. The two strands may be of the same or different lengths. The first strand may be 17-25 nucleotides in length, preferably it may be 18-24 nucleotides in length, it may be 18, 19, 20, 21, 22, 23 or 24 nucleotides in length. Most preferably, the first strand is 19 nucleotides in length. The second strand may independently be 17-25 nucleotides in length, preferably it may be 18-24 nucleotides in length, it may be 18, 19, 20, 21, 22, 23 or 24 nucleotides in length. More preferably, the second strand is 18 or 19 or 20 nucleotides in length, and most preferably it is 19 nucleotides in length.

[0080] Preferably, the first strand and the second strand of the nucleic acid form a duplex region of 17-25 nucleotides in length. More preferably, the duplex region is 18-24 nucleotides in length. The duplex region may be 17, 18, 19, 20, 21, 22, 23, 24 or 25 nucleotides in length. In the most preferred embodiment, the duplex region is 18 or 19 nucleotides in length. The duplex region is defined here as the region between and including the 5′-most nucleotide of the first strand that is base paired to a nucleotide of the second strand to the 3′-most nucleotide of the first strand that is base paired to a nucleotide of the second strand. The duplex region may comprise nucleotides in either or both strands that are not base-paired to a nucleotide in the other strand. It may comprise one, two, three or four such nucleotides on the first strand and/or on the second strand. However, preferably, the duplex region consists of 17-25 consecutive nucleotide base pairs. That is to say that it preferably comprises 17-25 consecutive nucleotides on both of the strands that all base pair to a nucleotide in the other strand. More preferably, the duplex region consists of 18 or 19 consecutive nucleotide base pairs, most preferably 18.

[0081] In each of the embodiments disclosed herein, the nucleic acid may be blunt ended at both ends; have an overhang at one end and a blunt end at the other end; or have an overhang at both ends.

[0082] The nucleic acid may have an overhang at one end and a blunt end at the other end. The nucleic acid may have an overhang at both ends. The nucleic acid may be blunt ended at both ends. The nucleic acid may be blunt ended at the end with the 5′ end of the first strand and the 3′ end of the second strand or at the 3′ end of the first strand and the 5′ end of the second strand.

[0083] The nucleic acid may comprise an overhang at a 3′ or 5′ end. The nucleic acid may have a 3′ overhang on the first strand. The nucleic acid may have a 3′ overhang on the second strand. The nucleic acid may have a 5′ overhang on the first strand. The nucleic acid may have a 5′ overhang on the second strand. The nucleic acid may have an overhang at both the 5′ end and 3′ end of the first strand. The nucleic acid may have an overhang at both the 5′ end and 3′ end of the second strand. The nucleic acid may have a 5′ overhang on the first strand and a 3′ overhang on the second strand. The nucleic acid may have a 3′ overhang on the first strand and a 5′ overhang on the second strand. The nucleic acid may have a 3′ overhang on the first strand and a 3′ overhang on the second strand. The nucleic acid may have a 5′ overhang on the first strand and a 5′ overhang on the second strand.

[0084] An overhang at the 3′ end or 5′ end of the second strand or the first strand may consist of 1, 2, 3, 4 and 5 nucleotides in length. Optionally, an overhang may consist of 1 or 2 nucleotides, which may or may not be modified.

[0085] In one embodiment, the 5′ end of the first strand is a single-stranded overhang of one, two or three nucleotides, preferably of one nucleotide.

[0086] Preferably, the nucleic acid is an siRNA. siRNAs are short interfering or short silencing RNAs that are able to inhibit the expression of a target gene through the RNA interference (RNAi) pathway. Inhibition occurs through targeted degradation of mRNA transcripts of the target gene after transcription. The siRNA forms part of the RISC complex. The RISC complex specifically targets the target RNA by sequence complementarity of the first (antisense) strand with the target sequence.

[0087] Preferably, the nucleic acid mediates RNA interference (RNAi). Preferably, the nucleic acid mediates RNA interference with an efficacy of at least 50% inhibition, more preferably at least 70%, more preferably at least 80%, even more preferably at least 90%, yet more preferably at least 95% and most preferably 100% inhibition. The inhibition efficacy is preferably measured by comparing the MASP-2 mRNA level in cells, such as hepatocytes, treated with a MASP-2 specific siRNA to the MASP-2 mRNA level in cells treated with a control in a comparable experiment. The control can be a treatment with a non-MASP-2 targeting siRNA or without a siRNA. The nucleic acid, or at least the first strand of the nucleic acid, is therefore preferably able to be incorporated into the RISC complex. As a result, the nucleic acid, or at least the first strand of the nucleic acid, is therefore able to guide the RISC complex to a specific target RNA with which the nucleic acid, or at least the first strand of the nucleic acid, is at least partially complementary. The RISC complex then specifically cleaves this target RNA and, as a result, leads to inhibition of the expression of the gene from which the RNA stems.

### Nucleic Acid Modifications

[0088] Nucleic acids discussed herein include unmodified RNA as well as RNA which has been modified, e.g., to improve efficacy or stability. Unmodified RNA refers to a molecule in which the components of the nucleic acid, namely sugars, bases, and phosphate moieties, are the same or essentially the same as those which occur in nature, for example as occur naturally in the human body. The term “modified nucleotide” as used herein refers to a nucleotide in which one or more of the components of the nucleotide, namely the sugar, base, and phosphate moiety, is/are different from those which occur in nature. The term “modified nucleotide” also refers in certain cases to molecules that are not nucleotides in the strict sense of the term because they lack, or have a substitute of, an essential component of a nucleotide, such as the sugar, base or phosphate moiety. A nucleic acid comprising such modified nucleotides is still to be understood as being a nucleic acid, even if one or more of the nucleotides of the nucleic acid has been replaced by a modified nucleotide that lacks, or has a substitution of, an essential component of a nucleotide.

[0089] Modifications of the nucleic acid of the present invention generally provide a powerful tool in overcoming potential limitations including, but not limited to, in vitro and in vivo stability and bioavailability inherent to native RNA molecules. The nucleic acids according to the invention may be modified by chemical modifications. Modified nucleic acids can also minimise the possibility of inducing interferon activity in humans. Modifications can further enhance the functional delivery of a nucleic acid to a target cell. The modified nucleic acids of the present invention may comprise one or more chemically modified ribonucleotides of either or both of the first strand or the second strand. A ribonucleotide may comprise a chemical modification of the base, sugar or phosphate moieties. The ribonucleic acid may be modified by substitution with or insertion of analogues of nucleic acids or bases.

[0090] Throughout the description of the invention, “same or common modification” means the same modification to any nucleotide, be that A, G, C or U modified with a group such as a methyl group (2′-OMe) or a fluoro group (2′-F). For example, 2′-F-dU, 2′-F-dA, 2′-F-dC, 2′-F-dG are all considered to be the same or common modification, as are 2′-OMe-rU, 2′-OMe-rA; 2′-OMe-rC; 2′-OMe-rG. In contrast, a 2′-F modification is a different modification compared to a 2′-OMe modification.

[0091] Preferably, at least one nucleotide of the first and/or second strand of the nucleic acid is a modified nucleotide, preferably a non-naturally occurring nucleotide such as preferably a 2′-F modified nucleotide.

[0092] A modified nucleotide can be a nucleotide with a modification of the sugar group. The 2′ hydroxyl group (OH) can be modified or replaced with a number of different “oxy” or “deoxy” substituents.

[0093] Examples of “oxy”-2′ hydroxyl group modifications include alkoxy or aryloxy (OR, e.g., R═H, alkyl (such as methyl), cycloalkyl, aryl, aralkyl, heteroaryl or sugar); polyethyleneglycols (PEG), O(CH₂CH₂O)ₙCH₂CH₂OR; “locked” nucleic acids (LNA) in which the 2′ hydroxyl is connected, e.g., by a methylene bridge, to the 4′ carbon of the same ribose sugar; O-AMINE (AMINE=NH₂, alkylamino, dialkylamino, heterocyclyl, arylamino, diaryl amino, heteroaryl amino, or diheteroaryl amino, ethylene diamine, or polyamino) and aminoalkoxy, O(CH₂)nAMINE, (e.g., AMINE=NH₂, alkylamino, dialkylamino, heterocyclyl, arylamino, diaryl amino, heteroaryl amino, or diheteroaryl amino, ethylene diamine, or polyamino).

[0094] “Deoxy” modifications include hydrogen, halogen, amino (e.g., NH₂, alkylamino, dialkylamino, heterocyclyl, arylamino, diaryl amino, heteroaryl amino, diheteroaryl amino, or amino acid); NH(CH₂CH₂NH), CH₂CH₂-AMINE (AMINE=NH₂, alkylamino, dialkylamino, heterocyclyl, arylamino, diaryl amino, heteroaryl amino, or diheteroaryl amino), —NHC(O)R (R=alkyl, cycloalkyl, aryl, aralkyl, heteroaryl or sugar), cyano; mercapto; alkyl-thio-alkyl; thioalkoxy; and alkyl, cycloalkyl, aryl, alkenyl and alkynyl, which may be optionally substituted with e.g., an amino functionality. Other substituents of certain embodiments include 2′-methoxyethyl, 2′-OCH₃, 2′-O-allyl, 2′-C-allyl, and 2′-fluoro.

[0095] The sugar group can also contain one or more carbons that possess the opposite stereochemical configuration than that of the corresponding carbon in ribose. Thus, a modified nucleotide may contain a sugar such as arabinose.

[0096] Modified nucleotides can also include “abasic” sugars, which lack a nucleobase at C-1′. These abasic sugars can further contain modifications at one or more of the constituent sugar atoms.

[0097] The 2′ modifications may be used in combination with one or more phosphate internucleoside linker modifications (e.g., phosphorothioate or phosphorodithioate).

[0098] One or more nucleotides of a nucleic acid of the present invention may be modified. The nucleic acid may comprise at least one modified nucleotide. The modified nucleotide may be in the first strand. The modified nucleotide may be in the second strand. The modified nucleotide may be in the duplex region. The modified nucleotide may be outside the duplex region, i.e., in a single-stranded region. The modified nucleotide may be on the first strand and may be outside the duplex region. The modified nucleotide may be on the second strand and may be outside the duplex region. The 3′-terminal nucleotide of the first strand may be a modified nucleotide. The 3′-terminal nucleotide of the second strand may be a modified nucleotide. The 5′-terminal nucleotide of the first strand may be a modified nucleotide. The 5′-terminal nucleotide of the second strand may be a modified nucleotide.

[0099] A nucleic acid of the invention may have 1 modified nucleotide or a nucleic acid of the invention may have about 2-4 modified nucleotides, or a nucleic acid may have about 4-6 modified nucleotides, about 6-8 modified nucleotides, about 8-10 modified nucleotides, about 10-12 modified nucleotides, about 12-14 modified nucleotides, about 14-16 modified nucleotides about 16-18 modified nucleotides, about 18-20 modified nucleotides, about 20-22 modified nucleotides, about 22-24 modified nucleotides, about 24-26 modified nucleotides or about 26-28 modified nucleotides. In each case the nucleic acid comprising said modified nucleotides retains at least 50% of its activity as compared to the same nucleic acid but without said modified nucleotides or vice versa. The nucleic acid may retain 55%, 60%, 65%, 70%, 75%, 80%, 85%, 90%, 95% or 100% and intermediate values of its activity as compared to the same nucleic acid but without said modified nucleotides, or may have more than 100% of the activity of the same nucleic acid without said modified nucleotides.

[0100] The modified nucleotide may be a purine or a pyrimidine. At least half of the purines may be modified. At least half of the pyrimidines may be modified. All of the purines may be modified. All of the pyrimidines may be modified. The modified nucleotides may be selected from the group consisting of a 3′ terminal deoxy thymine (dT) nucleotide, a 2′-O-methyl (2′-OMe) modified nucleotide, a 2′ modified nucleotide, a 2′ deoxy modified nucleotide, a locked nucleotide, an abasic nucleotide, a 2′ amino modified nucleotide, a 2′ alkyl modified nucleotide, a 2′-deoxy-2′-fluoro (2′-F) modified nucleotide, a morpholino nucleotide, a phosphoramidate, a non-natural base comprising nucleotide, a nucleotide comprising a 5′-phosphorothioate group, a nucleotide comprising a 5′ phosphate or 5′ phosphate mimic and a terminal nucleotide linked to a cholesteryl derivative or a dodecanoic acid bisdecylamide group.

[0101] The nucleic acid may comprise a nucleotide comprising a modified base, wherein the base is selected from 2-aminoadenosine, 2,6-diaminopurine, inosine, pyridin-4-one, pyridin-2-one, phenyl, pseudouracil, 2, 4, 6-trimethoxy benzene, 3-methyl uracil, dihydrouridine, naphthyl, aminophenyl, 5-alkylcytidine (e.g., 5-methylcytidine), 5-alkyluridine (e.g., ribothymidine), 5-halouridine (e.g., 5-bromouridine), 6-azapyrimidine, 6-alkylpyrimidine (e.g. 6-methyluridine), propyne, quesosine, 2-thiouridine, 4-thiouridine, wybutosine, wybutoxosine, 4-acetylcytidine, 5-(carboxyhydroxymethyl)uridine, 5′-carboxymethylaminomethyl-2-thiouridine, 5-carboxymethylaminomethyluridine, beta-D-galactosylqueosine, 1-methyladenosine, 1-methylinosine, 2,2-dimethylguanosine, 3-methylcytidine, 2-methyladenosine, 2-methylguanosine, N6-methyladenosine, 7-methylguanosine, 5-methoxyaminomethyl-2-thiouridine, 5-methylaminomethyluridine, 5-methylcarbonylmethyluridine, 5-methyloxyuridine, 5-methyl-2-thiouridine, 2-methylthio-N6-isopentenyladenosine, beta-D-mannosylqueosine, uridine-5-oxyacetic acid and 2-thiocytidine.

[0102] Many of the modifications described herein and that occur within a nucleic acid will be repeated within a polynucleotide molecule, such as a modification of a base, or a phosphate moiety, or a non-linking O of a phosphate moiety. In some cases, the modification will occur at all of the possible positions/nucleotides in the polynucleotide but in many cases it will not. A modification may only occur at a 3′ or 5′ terminal position, may only occur in a terminal region, such as at a position on a terminal nucleotide or in the last 2, 3, 4, 5, or 10 nucleotides of a strand. A modification may occur in a double-strand region, a single-strand region, or in both. A modification may occur only in the double-strand region of a nucleic acid of the invention or may only occur in a single-strand region of a nucleic acid of the invention. A phosphorothioate or phosphorodithioate modification at a non-linking O position may only occur at one or both termini, may only occur in a terminal region, e.g., at a position on a terminal nucleotide or in the last 2, 3, 4 or 5 nucleotides of a strand, or may occur in duplex and/or in single-strand regions, particularly at termini. The 5′ end and/or 3′ end may be phosphorylated.

[0103] Stability of a nucleic acid of the invention may be increased by including particular bases in overhangs, or by including modified nucleotides, in single-strand overhangs, e.g., in a 5′ or 3′ overhang, or in both. Purine nucleotides may be included in overhangs. All or some of the bases in a 3′ or 5′ overhang may be modified. Modifications can include the use of modifications at the 2′ OH group of the ribose sugar, the use of deoxyribonucleotides, instead of ribonucleotides, and modifications in the phosphate group, such as phosphorothioate or phosphorodithioate modifications. Overhangs need not be homologous with the target sequence.

[0104] Nucleases can hydrolyse nucleic acid phosphodiester bonds. However, chemical modifications to nucleic acids can confer improved properties, and can render oligoribonucleotides more stable to nucleases.

[0105] Modified nucleic acids, as used herein, can include one or more of:
[0106] (i) alteration, e.g., replacement, of one or both of the non-linking phosphate oxygens and/or of one or more of the linking phosphate oxygens (referred to as linking even if at the 5′ and 3′ terminus of the nucleic acid of the invention);
[0107] (ii) alteration, e.g., replacement, of a constituent of the ribose sugar, e.g., of the 2′ hydroxyl on the ribose sugar;
[0108] (iii) replacement of the phosphate moiety with “dephospho” linkers;
[0109] (iv) modification or replacement of a naturally occurring base;
[0110] (v) replacement or modification of the ribose-phosphate backbone; and
[0111] (vi) modification of the 3′ end or 5′ end of the first strand and/or the second strand, e.g., removal, modification or replacement of a terminal phosphate group or conjugation of a moiety, e.g., a fluorescently labelled moiety, to either the 3′ or 5′ end of one or both strands.

[0112] The terms “replacement”, “modification” and “alteration” indicate a difference from a naturally occurring molecule.

[0113] Specific modifications are discussed in more detail below.

[0114] The nucleic acid may comprise one or more nucleotides on the second and/or first strands that are modified. Alternating nucleotides may be modified, to form modified nucleotides.

[0115] “Alternating” as described herein means to occur one after another in a regular way. In other words, alternating means to occur in turn repeatedly. For example, if one nucleotide is modified, the next contiguous nucleotide is not modified and the following contiguous nucleotide is modified and so on. One nucleotide may be modified with a first modification, the next contiguous nucleotide may be modified with a second modification and the following contiguous nucleotide is modified with the first modification and so on, where the first and second modifications are different.

[0116] Some representative modified nucleic acid sequences of the present invention are shown in the examples. These examples are meant to be representative and not limiting.

[0117] In one aspect of the nucleic acid, at least nucleotides 2 and 14 of the first strand are modified, preferably by a first common modification, the nucleotides being numbered consecutively starting with nucleotide number 1 at the 5′ end of the first strand. The first modification is preferably 2′-F.

[0118] In one aspect, at least one, several or preferably all the even-numbered nucleotides of the first strand are modified, preferably by a first common modification, the nucleotides being numbered consecutively starting with nucleotide number 1 at the 5′ end of the first strand. The first modification is preferably 2′-F.

[0119] In one aspect, at least one, several or preferably all the odd-numbered nucleotides of the first strand are modified, the nucleotides being numbered consecutively starting with nucleotide number 1 at the 5′ end of the first strand. Preferably, they are modified by a second modification. This second modification is preferably different from the first modification if the nucleic acid also comprises a first modification, for example of nucleotides 2 and 14 or of all the even-numbered nucleotides of the first strand. The first modification is preferably any 2′ ribose modification that is of the same size or smaller in volume than a 2′-OH group, or a locked nucleic acid (LNA), or an unlocked nucleic acid (UNA), or a 2′-Fluoroarabino Nucleic Acid (FANA) modification. A 2′ ribose modification that is of the same size or smaller in volume than a 2′-OH group can for example be a 2′-F, 2′-H, 2′-halo, or 2′-NH₂. The second modification is preferably any 2′ ribose modification that is larger in volume than a 2′-OH group. A 2′ ribose modification that is larger in volume than a 2′-OH group can for example be a 2′-OMe, 2′-O-MOE (2′-O-methoxyethyl), 2′-O-allyl or 2′-O-alkyl, with the proviso that the nucleic is capable of reducing the expression of the target gene to at least the same extent as the same nucleic acid without the modification(s) under comparable conditions. The first modification is preferably 2′-F and/or the second modification is preferably 2′-OMe.

[0120] In the context of this disclosure, the size or volume of a substituent, such as a 2′ ribose modification, is preferably measured as the van der Waals volume.

[0121] In one aspect, at least one, several or preferably all the nucleotides of the second strand in a position corresponding to an even-numbered nucleotide of the first strand are modified, preferably by a third modification. Preferably in the same nucleic acid nucleotides 2 and 14 or all the even numbered nucleotides of the first strand are modified with a first modification. In addition, or alternatively, the odd-numbered nucleotides of the first strand are modified with a second modification. Preferably, the third modification is different from the first modification and/or the third modification is the same as the second modification. The first modification is preferably any 2′ ribose modification that is of the same size or smaller in volume than a 2′-OH group, or a locked nucleic acid (LNA), or an unlocked nucleic acid (UNA), or a 2′-Fluoroarabino Nucleic Acid (FANA) modification. A 2′ ribose modification that is of the same size or smaller in volume than a 2′-OH group can for example be a 2′-F, 2′-H, 2′-halo, or 2′-NH₂. The second and/or third modification is preferably any 2′ ribose modification that is larger in volume than a 2′-OH group. A 2′ ribose modification that is larger in volume than a 2′-OH group can for example be a 2′-OMe, 2′-O-MOE (2′-O-methoxyethyl), 2′-O-allyl or 2′-O-alkyl, with the proviso that the nucleic is capable of reducing the expression of the target gene to at least the same extent as the same nucleic acid without the modification(s) under comparable conditions. The first modification is preferably 2′-F and/or the second and/or third modification is/are preferably 2′-OMe. The nucleotides on the first strand are numbered consecutively starting with nucleotide number 1 at the 5′ end of the first strand.

[0122] A nucleotide of the second strand that is in a position corresponding, for example, to an even-numbered nucleotide of the first strand is a nucleotide of the second strand that is base-paired to an even-numbered nucleotide of the first strand.

[0123] In one aspect, at least one, several or preferably all the nucleotides of the second strand in a position corresponding to an odd-numbered nucleotide of the first strand are modified, preferably by a fourth modification. Preferably in the same nucleic acid nucleotides 2 and 14 or all the even numbered nucleotides of the first strand are modified with a first modification. In addition, or alternatively, the odd-numbered nucleotides of the first strand are modified with a second modification. In addition, or alternatively, all the nucleotides of the second strand in a position corresponding to an even-numbered nucleotide of the first strand are modified with a third modification. The fourth modification is preferably different from the second modification and preferably different from the third modification and the fourth modification is preferably the same as the first modification. The first and/or fourth modification is preferably any 2′ ribose modification that is of the same size or smaller in volume than a 2′-OH group, or a locked nucleic acid (LNA), or an unlocked nucleic acid (UNA), or a 2′-Fluoroarabino Nucleic Acid (FANA) modification. A 2′ ribose modification that is of the same size or smaller in volume than a 2′-OH group can for example be a 2′-F, 2′-H, 2′-halo, or 2′-NH₂. The second and/or third modification is preferably any 2′ ribose modification that is larger in volume than a 2′-OH group. A 2′ ribose modification that is larger in volume than a 2′-OH group can for example be a 2′-OMe, 2′-O-MOE (2′-O-methoxyethyl), 2′-O-allyl or 2′-O-alkyl, with the proviso that the nucleic is capable of reducing the expression of the target gene to at least the same extent as the same nucleic acid without the modification(s) under comparable conditions. The first and/or the fourth modification is/are preferably a 2′-OMe modification and/or the second and/or third modification is/are preferably a 2′-F modification. The nucleotides on the first strand are numbered consecutively starting with nucleotide number 1 at the 5′ end of the first strand.

[0124] In one aspect of the nucleic acid, the nucleotide/nucleotides of the second strand in a position corresponding to nucleotide 11 or nucleotide 13 or nucleotides 11 and 13 or nucleotides 11-13 of the first strand is/are modified by a fourth modification. Preferably, all the nucleotides of the second strand other than the nucleotide/nucleotides in a position corresponding to nucleotide 11 or nucleotide 13 or nucleotides 11 and 13 or nucleotides 11-13 of the first strand is/are modified by a third modification. Preferably in the same nucleic acid nucleotides 2 and 14 or all the even numbered nucleotides of the first strand are modified with a first modification. In addition, or alternatively, the odd-numbered nucleotides of the first strand are modified with a second modification. The fourth modification is preferably different from the second modification and preferably different from the third modification and the fourth modification is preferably the same as the first modification. The first and/or fourth modification is preferably any 2′ ribose modification that is of the same size or smaller in volume than a 2′-OH group, or a locked nucleic acid (LNA), or an unlocked nucleic acid (UNA), or a 2′-Fluoroarabino Nucleic Acid (FANA) modification. A 2′ ribose modification that is of the same size or smaller in volume than a 2′-OH group can for example be a 2′-F, 2′-H, 2′-halo, or 2′-NH₂. The second and/or third modification is preferably any 2′ ribose modification that is larger in volume than a 2′-OH group. A 2′ ribose modification that is larger in volume than a 2′-OH group can for example be a 2′-OMe, 2′-O-MOE (2′-O-methoxyethyl), 2′-O-allyl or 2′-O-alkyl, with the proviso that the nucleic is capable of reducing the expression of the target gene to at least the same extent as the same nucleic acid without the modification(s) under comparable conditions. The first and/or the fourth modification is/are preferably a 2′-OMe modification and/or the second and/or third modification is/are preferably a 2′-F modification. The nucleotides on the first strand are numbered consecutively starting with nucleotide number 1 at the 5′ end of the first strand.

[0125] In one aspect of the nucleic acid, all the even-numbered nucleotides of the first strand are modified by a first modification, all the odd-numbered nucleotides of the first strand are modified by a second modification, all the nucleotides of the second strand in a position corresponding to an even-numbered nucleotide of the first strand are modified by a third modification, all the nucleotides of the second strand in a position corresponding to an odd-numbered nucleotide of the first strand are modified by a fourth modification, wherein the first and/or fourth modification is/are 2′-F and/or the second and/or third modification is/are 2′-OMe.

[0126] In one aspect of the nucleic acid, all the even-numbered nucleotides of the first strand are modified by a first modification, all the odd-numbered nucleotides of the first strand are modified by a second modification, all the nucleotides of the second strand in positions corresponding to nucleotides 11-13 of the first strand are modified by a fourth modification, all the nucleotides of the second strand other than the nucleotides corresponding to nucleotides 11-13 of the first strand are modified by a third modification, wherein the first and fourth modification are 2′-F and the second and third modification are 2′-OMe. In one embodiment in this aspect, the 3′ terminal nucleotide of the second strand is an inverted RNA nucleotide (i.e., the nucleotide is linked to the 3′ end of the strand through its 3′ carbon, rather than through its 5′ carbon as would normally be the case). When the 3′ terminal nucleotide of the second strand is an inverted RNA nucleotide, the inverted RNA nucleotide is preferably an unmodified nucleotide in the sense that it does not comprise any modifications compared to the natural nucleotide counterpart. Specifically, the inverted RNA nucleotide is preferably a 2′-OH nucleotide. Preferably, in this aspect when the 3′ terminal nucleotide of the second strand is an inverted RNA nucleotide, the nucleic acid is blunt-ended at least at the end that comprises the 5′ end of the first strand.

[0127] One aspect of the present invention is a nucleic acid as disclosed herein for inhibiting expression of the MASP-2 gene, preferably in a cell, wherein said first strand includes modified nucleotides or unmodified nucleotides at a plurality of positions in order to facilitate processing of the nucleic acid by RISC.

[0128] In one aspect, “facilitate processing by RISC” means that the nucleic acid can be processed by RISC, for example any modification present will permit the nucleic acid to be processed by RISC and preferably, will be beneficial to processing by RISC, suitably such that siRNA activity can take place.

[0129] A nucleic acid as disclosed herein, wherein the nucleotides at positions 2 and 14 from the 5′ end of the first strand are not modified with a 2′-OMe modification, and the nucleotide/nucleotides on the second strand which corresponds to position 11 or position 13 or positions 11 and 13 or positions 11, 12 and 13 of the first strand is/are not modified with a 2′-OMe modification (in other words, they are not modified or are modified with a modification other than 2′-OMe).

[0130] In one aspect, the nucleotide on the second strand which corresponds to position 13 of the first strand is the nucleotide that forms a base pair with position 13 (from the 5′ end) of the first strand.

[0131] In one aspect, the nucleotide on the second strand which corresponds to position 11 of the first strand is the nucleotide that forms a base pair with position 11 (from the 5′ end) of the first strand.

[0132] In one aspect, the nucleotide on the second strand which corresponds to position 12 of the first strand is the nucleotide that forms a base pair with position 12 (from the 5′ end) of the first strand.

[0133] For example, in a 19-mer nucleic acid which is double-stranded and blunt ended, position 13 (from the 5′ end) of the first strand would pair with position 7 (from the 5′ end) of the second strand. Position 11 (from the 5′ end) of the first strand would pair with position 9 (from the 5′ end) of the second strand. This nomenclature may be applied to other positions of the second strand.

[0134] In one aspect, in the case of a partially complementary first and second strand, the nucleotide on the second strand that “corresponds to” a position on the first strand may not necessarily form a base pair if that position is the position in which there is a mismatch, but the principle of the nomenclature still applies.

[0135] One aspect is a nucleic acid as disclosed herein, wherein the nucleotides at positions 2 and 14 from the 5′ end of the first strand are not modified with a 2′-OMe modification, and the nucleotides on the second strand which correspond to position 11, or 13, or 11 and 13, or 11-13 of the first strand are modified with a 2′-F modification.

[0136] One aspect is a nucleic acid as disclosed herein, wherein the nucleotides at positions 2 and 14 from the 5′ end of the first strand are modified with a 2′-F modification, and the nucleotides on the second strand which correspond to position 11, or 13, or 11 and 13, or 11-13 of the first strand are not modified with a 2′-OMe modification.

[0137] One aspect is a nucleic acid as disclosed herein, wherein the nucleotides at positions 2 and 14 from the 5′ end of the first strand are modified with a 2′-F modification, and the nucleotides on the second strand which correspond to position 11, or 13, or 11 and 13, or 11-13 of the first strand are modified with a 2′-F modification.

[0138] One aspect is a nucleic acid as disclosed herein wherein greater than 50% of the nucleotides of the first and/or second strand comprise a 2′-OMe modification, such as greater than 55%, 60%, 65%, 70%, 75%, 80%, or 85%, or more, of the first and/or second strand comprise a 2′-OMe modification, preferably measured as a percentage of the total nucleotides of both the first and second strands.

[0139] One aspect is a nucleic acid as disclosed herein wherein greater than 50% of the nucleotides of the first and/or second strand comprise a naturally occurring RNA modification, such as wherein greater than 55%, 60%, 65%, 70%, 75%, 80%, or 85% or more of the first and/or second strands comprise such a modification, preferably measured as a percentage of the total nucleotides of both the first and second strands. Suitable naturally occurring modifications include, as well as 2′-OMe, other 2′ sugar modifications, in particular a 2′-H modification resulting in a DNA nucleotide.

[0140] One aspect is a nucleic acid as disclosed herein comprising no more than 20%, such as no more than 15% such as no more than 10%, of nucleotides which have 2′ modifications that are not 2′-OMe modifications on the first and/or second strand, preferably as a percentage of the total nucleotides of both the first and second strands.

[0141] One aspect is a nucleic acid as disclosed herein, wherein the number of nucleotides in the first and/or second strand with a 2′-modification that is not a 2′-OMe modification is no more than 7, more preferably no more than 5, and most preferably no more than 3.

[0142] One aspect is a nucleic acid as disclosed herein comprising no more than 20%, (such as no more than 15% or no more than 10%) of 2′-F modifications on the first and/or second strand, preferably as a percentage of the total nucleotides of both strands.

[0143] One aspect is a nucleic acid as disclosed herein, wherein the number of nucleotides in the first 35 and/or second strand with a 2′-F modification is no more than 7, more preferably no more than 5, and most preferably no more than 3.

[0144] One aspect is a nucleic acid as disclosed herein, wherein all nucleotides are modified with a 2′-OMe modification except positions 2 and 14 from the 5′ end of the first strand and the nucleotides on the second strand which correspond to position 11, or 13, or 11 and 13, or 11-13 of the first strand. Preferably the nucleotides that are not modified with 2′-OMe are modified with fluoro at the 2′ position (2′-F modification).

[0145] In certain embodiments, a preferred aspect is a nucleic acid as disclosed herein wherein all nucleotides of the nucleic acid are modified at the 2′ position of the sugar. Preferably these nucleotides are modified with a 2′-F modification where the modification is not a 2′-OMe modification.

[0146] In one aspect the nucleic acid is modified on the first strand with alternating 2′-OMe modifications and 2-F modifications, and positions 2 and 14 (starting from the 5′ end) are modified with 2′-F. Preferably the second strand is modified with 2′-F modifications at nucleotides on the second strand which correspond to position 11, or 13, or 11 and 13, or 11-13 of the first strand. Preferably the second strand is modified with 2′-F modifications at positions 11-13 counting from the 3′ end starting at the first position of the complementary (double-stranded) region, and the remaining modifications are naturally occurring modifications, preferably 2′-OMe. The complementary region at least in this case starts at the first position of the second strand that has a corresponding nucleotide in the first strand, regardless of whether the two nucleotides are able to base pair to each other.

[0147] In one aspect of the nucleic acid, each of the nucleotides of the first strand and of the second strand is a modified nucleotide.

[0148] The term “odd numbered” as described herein means a number not divisible by two. Examples of odd numbers are 1, 3, 5, 7, 9, 11 and so on. The term “even numbered” as described herein means a number which is evenly divisible by two. Examples of even numbers are 2, 4, 6, 8, 10, 12, 14 and so on.

[0149] Unless specifically stated otherwise, herein the nucleotides of the first strand are numbered contiguously starting with nucleotide number 1 at the 5′ end of the first strand. Nucleotides of the second strand are numbered contiguously starting with nucleotide number 1 at the 3′ end of the second strand.

[0150] One or more nucleotides on the first and/or second strand may be modified, to form modified nucleotides. One or more of the odd-numbered nucleotides of the first strand may be modified.

[0151] One or more of the even-numbered nucleotides of the first strand may be modified by at least a second modification, wherein the at least second modification is different from the modification on the one or more odd nucleotides. At least one of the one or more modified even numbered-nucleotides may be adjacent to at least one of the one or more modified odd-numbered nucleotides.

[0152] A plurality of odd-numbered nucleotides in the first strand may be modified in the nucleic acid of the invention. A plurality of even-numbered nucleotides in the first strand may be modified by a second modification. The first strand may comprise adjacent nucleotides that are modified by a common modification. The first strand may also comprise adjacent nucleotides that are modified by a second different modification (i.e., the first strand may comprise nucleotides that are adjacent to each other and modified by a first modification as well as other nucleotides that are adjacent to each other and modified by a second modification that is different to the first modification).

[0153] One or more of the odd-numbered nucleotides of the second strand (wherein the nucleotides are numbered contiguously starting with nucleotide number 1 at the 3′ end of the second strand) may be modified by a modification that is different to the modification of the odd-numbered nucleotides on the first strand (wherein the nucleotides are numbered contiguously starting with nucleotide number 1 at the 5′ end of the first strand) and/or one or more of the even-numbered nucleotides of the second strand may be modified by the same modification of the odd-numbered nucleotides of the first strand. At least one of the one or more modified even-numbered nucleotides of the second strand may be adjacent to the one or more modified odd-numbered nucleotides. A plurality of odd-numbered nucleotides of the second strand may be modified by a common modification and/or a plurality of even-numbered nucleotides may be modified by the same modification that is present on the first stand odd-numbered nucleotides. A plurality of odd-numbered nucleotides on the second strand may be modified by a modification that is different from the modification of the first strand odd-numbered nucleotides.

[0154] The second strand may comprise adjacent nucleotides that are modified by a common modification, which may be a modification that is different from the modification of the odd-numbered nucleotides of the first strand.

[0155] In some aspects of the nucleic acid of the invention, each of the odd-numbered nucleotides in the first strand and each of the even-numbered nucleotides in the second strand may be modified with a common modification and, each of the even-numbered nucleotides may be modified in the first strand with a different modification and each of the odd-numbered nucleotides may be modified in the second strand with the different modification.

[0156] The nucleic acid of the invention may have the modified nucleotides of the first strand shifted by at least one nucleotide relative to the unmodified or differently modified nucleotides of the second strand.

[0157] In certain aspects, one ne or more or each of the odd numbered-nucleotides may be modified in the first strand and one or more or each of the even-numbered nucleotides may be modified in the second strand. One or more or each of the alternating nucleotides on either or both strands may be modified by a second modification. One or more or each of the even-numbered nucleotides may be modified in the first strand and one or more or each of the even-numbered nucleotides may be modified in the second strand. One or more or each of the alternating nucleotides on either or both strands may be modified by a second modification. One or more or each of the odd-numbered nucleotides may be modified in the first strand and one or more of the odd-numbered nucleotides may be modified in the second strand by a common modification. One or more or each of the alternating nucleotides on either or both strands may be modified by a second modification. One or more or each of the even-numbered nucleotides may be modified in the first strand and one or more or each of the odd-numbered nucleotides may be modified in the second strand by a common modification. One or more or each of the alternating nucleotides on either or both strands may be modified by a second modification.

[0158] The nucleic acid of the invention may comprise single- or double-stranded constructs that comprise at least two regions of alternating modifications in one or both of the strands. These alternating regions can comprise up to about 12 nucleotides but preferably comprise from about 3 to about 10 nucleotides. The regions of alternating nucleotides may be located at the termini of one or both strands of the nucleic acid of the invention. The nucleic acid may comprise from 4 to about 10 nucleotides of alternating nucleotides at each of the termini (3′ and 5′) and these regions may be separated by from about 5 to about 12 contiguous unmodified or differently or commonly modified nucleotides.

[0159] The odd numbered nucleotides of the first strand may be modified and the even numbered nucleotides may be modified with a second modification. The second strand may comprise adjacent nucleotides that are modified with a common modification, which may be the same as the modification of the odd-numbered nucleotides of the first strand. One or more nucleotides of the second strand may also be modified with the second modification. One or more nucleotides with the second modification may be adjacent to each other and to nucleotides having a modification that is the same as the modification of the odd-numbered nucleotides of the first strand. The first strand may also comprise phosphorothioate linkages between the two nucleotides at the 3′ end and at the 5′ end or a phosphorodithioate linkage between the two nucleotides at the 3′ end. The second strand may comprise a phosphorothioate or phosphorodithioate linkage between the two nucleotides at the 5′ end. The second strand may also be conjugated to a ligand at the 5′ end.

[0160] The nucleic acid of the invention may comprise a first strand comprising adjacent nucleotides that are modified with a common modification. One or more such nucleotides may be adjacent to one or more nucleotides which may be modified with a second modification. One or more nucleotides with the second modification may be adjacent. The second strand may comprise adjacent nucleotides that are modified with a common modification, which may be the same as one of the modifications of one or more nucleotides of the first strand. One or more nucleotides of the second strand may also be modified with the second modification. One or more nucleotides with the second modification may be adjacent. The first strand may also comprise phosphorothioate linkages between the two nucleotides at the 3′ end and at the 5′ end or a phosphorodithioate linkage between the two nucleotides at the 3′ end. The second strand may comprise a phosphorothioate or phosphorodithioate linkage between the two nucleotides at the 3′ end. The second strand may also be conjugated to a ligand at the 5′ end. The nucleotides numbered from 5′ to 3′ on the first strand and 3′ to 5′ on the second strand, 1, 3, 5, 7, 9, 11, 13, 15, 17, 19, 21, 23 and 25 may be modified by a modification on the first strand. The nucleotides numbered 2, 4, 6, 8, 10, 12, 14, 16, 18, 20, 22 and 24 may be modified by a second modification on the first strand. The nucleotides numbered 1, 3, 5, 7, 9, 11, 13, 15, 17, 19, 21, 23 may be modified by a modification on the second strand. The nucleotides numbered 2, 4, 6, 8, 10, 12, 14, 16, 18, 20, 22 and 24 may be modified by a second modification on the second strand. Nucleotides are numbered for the sake of the nucleic acid of the present invention from 5′ to 3′ on the first strand and 3′ to 5′ on the second strand.

[0161] The nucleotides numbered 2, 4, 6, 8, 10, 12, 14, 16, 18, 20, 22 and 24 may be modified by a modification on the first strand. The nucleotides numbered 1, 3, 5, 7, 9, 11, 13, 15, 17, 19, 21, 23 may be modified by a second modification on the first strand. The nucleotides numbered 1, 3, 5, 7, 9, 11, 13, 15, 17, 19, 21, 23 may be modified by a modification on the second strand. The nucleotides numbered 2, 4, 6, 8, 10, 12, 14, 16, 18, 20, 22 and 24 may be modified by a second modification on the second strand.

[0162] Clearly, if the first and/or the second strand are shorter than 25 nucleotides in length, such as 19 nucleotides in length, there are no nucleotides numbered 20, 21, 22, 23, 24 and 25 to be modified. The skilled person understands the description above to apply to shorter strands, accordingly.

[0163] One or more modified nucleotides on the first strand may be paired with modified nucleotides on the second strand having a common modification. One or more modified nucleotides on the first strand may be paired with modified nucleotides on the second strand having a different modification. One or more modified nucleotides on the first strand may be paired with unmodified nucleotides on the second strand. One or more modified nucleotides on the second strand may be paired with unmodified nucleotides on the first strand. In other words, the alternating nucleotides can be aligned on the two strands such as, for example, all the modifications in the alternating regions of the second strand are paired with identical modifications in the first strand or alternatively the modifications can be offset by one nucleotide with the common modifications in the alternating regions of one strand pairing with dissimilar modifications (i.e., a second or further modification) in the other strand. Another option is to have dissimilar modifications in each of the strands.

[0164] The modifications on the first strand may be shifted by one nucleotide relative to the modified nucleotides on the second strand, such that common modified nucleotides are not paired with each other.

[0165] The modification and/or modifications may each and individually be selected from the group consisting of 3′ terminal deoxy thymine, 2′-OMe, a 2′ deoxy modification, a 2′ amino modification, a 2′ alkyl modification, a morpholino modification, a phosphoramidate modification, 5′-phosphorothioate group modification, a 5′ phosphate or 5′ phosphate mimic modification and a cholesteryl derivative or a dodecanoic acid bisdecylamide group modification and/or the modified nucleotide may be any one of a locked nucleotide, an abasic nucleotide or a non-natural base comprising nucleotide. At least one modification may be 2′-OMe and/or at least one modification may be 2′-F. Further modifications as described herein may be present on the first and/or second strand.

[0166] The nucleic acid of the invention may comprise an inverted RNA nucleotide at one or several of the strand ends. Such inverted nucleotides provide stability to the nucleic acid. Preferably, the nucleic acid comprises at least an inverted nucleotide at the 3′ end of the first and/or the second strand and/or at the 5′ end of the second strand. More preferably, the nucleic acid comprises an inverted nucleotide at the 3′ end of the second strand. Most preferably, the nucleic acid comprises an inverted RNA nucleotide at the 3′ end of the second strand and this nucleotide is preferably an inverted A. An inverted nucleotide is a nucleotide that is linked to the 3′ end of a nucleic acid through its 3′ carbon, rather than its 5′ carbon as would normally be the case or is linked to the 5′ end of a nucleic acid through its 5′ carbon, rather than its 3′ carbon as would normally be the case. The inverted nucleotide is preferably present at an end of a strand not as an overhang but opposite a corresponding nucleotide in the other strand. Accordingly, the nucleic acid is preferably blunt-ended at the end that comprises the inverted RNA nucleotide. An inverted RNA nucleotide being present at the end of a strand preferably means that the last nucleotide at this end of the strand is the inverted RNA nucleotide. A nucleic acid with such a nucleotide is stable and easy to synthesise. The inverted RNA nucleotide is preferably an unmodified nucleotide in the sense that it does not comprise any modifications compared to the natural nucleotide counterpart. Specifically, the inverted RNA nucleotide is preferably a 2′-OH nucleotide.

[0167] Nucleic acids of the invention may comprise one or more nucleotides modified at the 2′ position with a 2′-H, and therefore having a DNA nucleotide within the nucleic acid. Nucleic acids of the invention may comprise DNA nucleotides at positions 2 and/or 14 of the first strand counting from the 5′ end of the first strand. Nucleic acids may comprise DNA nucleotides on the second strand which correspond to position 11, or 13, or 11 and 13, or 11-13 of the first strand.

[0168] In one aspect there is no more than one DNA nucleotide per nucleic acid of the invention. Nucleic acids of the invention may comprise one or more LNA nucleotides. Nucleic acids of the invention may comprise LNA nucleotides at positions 2 and/or 14 of the first strand counting from the 5′ end of the first strand. Nucleic acids may comprise LNA on the second strand which correspond to position 11, or 13, or 11 and 13, or 11-13 of the first strand.

[0169] Some representative modified nucleic acid sequences of the present invention are shown in the examples. These examples are meant to be representative and not limiting.

[0170] In certain preferred embodiments, the nucleic acid may comprise a first modification and a second or further modification which are each and individually selected from the group comprising 2′-OMe modification and 2′-F modification. The nucleic acid may comprise a modification that is 2′-OMe that may be a first modification, and a second modification that is 2′-F. The nucleic acid of the invention may also include a phosphorothioate or phosphorodithioate modification and/or a deoxy modification which may be present in or between the terminal 2 or 3 nucleotides of each or any end of each or both strands.

[0171] In one aspect of the nucleic acid, at least one nucleotide of the first and/or second strand is a modified nucleotide, wherein if the first strand comprises at least one modified nucleotide:
[0172] (i) at least one or both of the nucleotides 2 and 14 of the first strand is/are modified by a first modification; and/or
[0173] (ii) at least one, several, or all the even-numbered nucleotides of the first strand is/are modified by a first modification; and/or
[0174] (iii) at least one, several, or all the odd-numbered nucleotides of the first strand is/are modified by a second modification; and/or
[0175] wherein if the second strand comprises at least one modified nucleotide:
[0176] (iv) at least one, several, or all the nucleotides of the second strand in a position corresponding to an even-numbered nucleotide of the first strand is/are modified by a third modification; and/or
[0177] (v) at least one, several, or all the nucleotides of the second strand in a position corresponding to an odd-numbered nucleotide of the first strand is/are modified by a fourth modification; and/or
[0178] (vi) at least one, several, or all the nucleotides of the second strand in a position corresponding to nucleotide 11 or nucleotide 13 or nucleotides 11 and 13 or nucleotides 11-13 of the first strand is/are modified by a fourth modification; and/or
[0179] (vii) at least one, several, or all the nucleotides of the second strand in a position other than the position corresponding to nucleotide 11 or nucleotide 13 or nucleotides 11 and 13 or nucleotides 11-13 of the first strand is/are modified by a third modification;
[0180] wherein the nucleotides on the first strand are numbered consecutively starting with nucleotide number 1 at the 5′ end of the first strand;
[0181] wherein the modifications are preferably at least one of the following:
[0182] (a) the first modification is preferably different from the second and from the third modification;
[0183] (b) the first modification is preferably the same as the fourth modification;
[0184] (c) the second and the third modification are preferably the same modification;
[0185] (d) the first modification is preferably a 2′-F modification;
[0186] (e) the second modification is preferably a 2′-OMe modification;
[0187] (f) the third modification is preferably a 2′-OMe modification; and/or
[0188] (g) the fourth modification is preferably a 2′-F modification; and
[0189] wherein optionally the nucleic acid is conjugated to a ligand.

[0190] One aspect is a double-stranded nucleic acid for inhibiting expression of MASP-2, preferably in a cell, wherein the nucleic acid comprises a first strand and a second strand, wherein the unmodified equivalent of the first strand sequence comprises a sequence of at least 15 nucleotides differing by no more than 3 nucleotides from any one of the first strand sequences shown in Table 5a, or in Table 1, wherein all the even-numbered nucleotides of the first strand are modified by a first modification, all the odd-numbered nucleotides of the first strand are modified by a second modification, all the nucleotides of the second strand in a position corresponding to an even-numbered nucleotide of the first strand are modified by a third modification, all the nucleotides of the second strand in a position corresponding to an odd-numbered nucleotide of the first strand are modified by a fourth modification, wherein the first and fourth modification are 2′-F and the second and third modification are 2′-OMe.

[0191] One aspect is a double-stranded nucleic acid for inhibiting expression of MASP-2, preferably in a cell, wherein the nucleic acid comprises a first strand and a second strand, wherein the unmodified equivalent of the first strand sequence comprises a sequence of at least 15 nucleotides differing by no more than 3 nucleotides from any one of the first strand sequences shown in Table 5a, or in Table 1, wherein all the even-numbered nucleotides of the first strand are modified by a first modification, all the odd-numbered nucleotides of the first strand are modified by a second modification, all the nucleotides of the second strand in positions corresponding to nucleotides 11-13 of the first strand are modified by a fourth modification, all the nucleotides of the second strand other than the nucleotides corresponding to nucleotides 11-13 of the first strand are modified by a third modification, wherein the first and fourth modification are 2′-F and the second and third modification are 2′-OMe.

[0192] The 3′ and 5′ ends of an oligonucleotide can be modified. Such modifications can be at the 3′ end or the 5′ end or both ends of the molecule. They can include modification or replacement of an entire terminal phosphate or of one or more of the atoms of the phosphate group. For example, the 3′ and 5′ ends of an oligonucleotide can be conjugated to other functional molecular entities such as labelling moieties, e.g., fluorophores (e.g., pyrene, TAMRA, fluorescein, Cy3 or Cy5 dyes) or protecting groups (based, e.g., on sulfur, silicon, boron or ester). The functional molecular entities can be attached to the sugar through a phosphate group and/or a linker. The terminal atom of the linker can connect to or replace the linking atom of the phosphate group or the C-3′ or C-5′ O, N, S or C group of the sugar. Alternatively, the linker can connect to or replace the terminal atom of a nucleotide surrogate (e.g., PNAs). These spacers or linkers can include e.g., —(CH₂)ₙ—, —(CH₂)ₙN—, —(CH₂)ₙO—, —(CH₂)ₙS—, —(CH₂CH₂O)ₙCH₂CH₂O— (e.g., n=3 or 6), abasic sugars, amide, carboxy, amine, oxyamine, oxyimine, thioether, disulfide, thiourea, sulfonamide, or morpholino, or biotin and fluorescein reagents. The 3′ end can be an —OH group.

[0193] Other examples of terminal modifications include dyes, intercalating agents (e.g., acridines), cross-linkers (e.g., psoralene, mitomycin C), porphyrins (TPPC4, texaphyrin, Sapphyrin), polycyclic aromatic hydrocarbons (e.g., phenazine, dihydrophenazine), artificial endonucleases, EDTA, lipophilic carriers (e.g., cholesterol, cholic acid, adamantane acetic acid, 1-pyrene butyric acid, dihydrotestosterone, 1,3-Bis-O(hexadecyl)glycerol, geranyloxyhexyl group, hexadecylglycerol, borneol, menthol, 1,3-propanediol, heptadecyl group, palmitic acid, myristic acid, O3-(oleoyl)lithocholic acid, O3-(oleoyl)cholenic acid, dimethoxytrityl, or phenoxazine) and peptide conjugates (e.g., antennapedia peptide, Tat peptide), alkylating agents, phosphate, amino, mercapto, PEG (e.g., PEG-40K), MPEG, [MPEG]2, polyamino, alkyl, substituted alkyl, radiolabeled markers, enzymes, haptens (e.g., biotin), transport/absorption facilitators (e.g., aspirin, vitamin E, folic acid), synthetic ribonucleases (e.g., imidazole, bisimidazole, histamine, imidazole clusters, acridine-imidazole conjugates, Eu3+ complexes of tetraazamacrocycles).

[0194] Terminal modifications can also be useful for monitoring distribution, and in such cases the groups to be added may include fluorophores, e.g., fluorescein or an Alexa dye. Terminal modifications can also be useful for enhancing uptake, useful modifications for this include cholesterol. Terminal modifications can also be useful for cross-linking an RNA agent to another moiety.

[0195] Terminal modifications can be added for a number of reasons, including to modulate activity or to modulate resistance to degradation. Terminal modifications useful for modulating activity include modification of the 5′ end with phosphate or phosphate analogues. Nucleic acids of the invention, on the first or second strand, may be 5′ phosphorylated or include a phosphoryl analogue at the 5′ prime terminus. 5′-phosphate modifications include those which are compatible with RISC mediated gene silencing. Suitable modifications include: 5′-monophosphate ((HO)₂(O)P—O-5′); 5′-diphosphate ((HO)₂(O)P—O—P(HO)(O)—O-5′); 5′-triphosphate ((HO)₂(O)P—O—(HO)(O)P—O—P(HO)(O)—O-5′); 5′-guanosine cap (7-methylated or non-methylated) (7m-G-O-5′-(HO)(O)P—O—(HO)(O)P—O—P(HO)(O)—O-5′); 5′-adenosine cap (Appp), and any modified or unmodified nucleotide cap structure (N—O-5′-(HO)(O)P—O—(HO)(O)P—O—P(HO)(O)—O-5′); 5′-monothiophosphate (phosphorothioate; (HO)₂(S)P—O-5′); 5′-monodithiophosphate (phosphorodithioate; (HO)(HS)(S)P—O-5′), 5′-phosphorothiolate ((HO)₂(O)P—S-5′); any additional combination of oxygen/sulfur replaced monophosphate, diphosphate and triphosphates (e.g., 5′-alpha-thiotriphosphate, 5′-gamma-thiotriphosphate, etc.), 5′-phosphoramidates ((HO)₂(O)P—NH-5′, (HO)(NH₂)(O)P—O-5′), 5′-alkylphosphonates (alkyl=methyl, ethyl, isopropyl, propyl, etc., e.g. RP(OH)(O)—O-5′- (wherein R is an alkyl), (OH)₂(O)P-5′-CH₂—), 5′ vinylphosphonate, 5′-alkyletherphosphonates (alkylether=methoxymethyl (MeOCH₂—), ethoxymethyl, etc., e.g. RP(OH)(O)—O-5′- (wherein R is an alkylether)).

[0196] Certain moieties may be linked to the 5′ terminus of the first strand or the second strand. These include abasic ribose moiety, abasic deoxyribose moiety, modifications abasic ribose and abasic deoxyribose moieties including 2′-O alkyl modifications; inverted abasic ribose and abasic deoxyribose moieties and modifications thereof, C6-imino-Pi; a mirror nucleotide including L-DNA and L-RNA; 5′OMe nucleotide; and nucleotide analogues including 4′,5′-methylene nucleotide; 1-(β-D-erythrofuranosyl)nucleotide; 4′-thio nucleotide, carbocyclic nucleotide; 5′-amino-alkyl phosphate; 1,3-diamino-2-propyl phosphate, 3-aminopropyl phosphate; 6-aminohexyl phosphate; 12-aminododecyl phosphate; hydroxypropyl phosphate; 1,5-anhydrohexitol nucleotide; alpha-nucleotide; threo-pentofuranosyl nucleotide; acyclic 3′,4′-seco nucleotide; 3,4-dihydroxybutyl nucleotide; 3,5-dihydroxypentyl nucleotide, 5′-5′-inverted abasic moiety; 1,4-butanediol phosphate; 5′-amino; and bridging or non-bridging methylphosphonate and 5′-mercapto moieties.

[0197] In each sequence described herein, a C-terminal “—OH” moiety may be substituted for a C-terminal “—NH₂” moiety, and vice-versa.

[0198] The invention also provides a nucleic acid according to any aspect of the invention described herein, wherein the first strand has a terminal 5′ (E)-vinylphosphonate nucleotide at its 5′ end. This terminal 5′ (E)-vinylphosphonate nucleotide is preferably linked to the second nucleotide in the first strand by a phosphodiester linkage. Preferably, the terminal 5′ (E)-vinylphosphonate (“vp”) nucleotide is a uridine (“vp-U”).

[0199] The first strand of the nucleic acid may comprise formula (I):

(vp)-N₍ₚₒ₎[N₍ₚₒ₎]ₙ- (1)

where ‘(vp)-’ is the 5′ (E)-vinylphosphonate, ‘N’ is a nucleotide, ‘po’ is a phosphodiester linkage, and n is from 1 to (the total number of nucleotides in the first strand—2), preferably wherein n is from 1 to (the total number of nucleotides in the first strand—3), more preferably wherein n is from 1 to (the total number of nucleotides in the first strand—4).

[0200] Preferably, the terminal 5′ (E)-vinylphosphonate nucleotide is an RNA nucleotide, preferably a (vp)-U.

[0201] A terminal 5′ (E)-vinylphosphonate nucleotide is a nucleotide wherein the phosphate group at the 5′-end of the ribose has been replaced with a E-vinylphosphonate group:

[chemical structure]

[0202] In one aspect, the first strand has a terminal 5′ (E)-vinylphosphonate nucleotide at its 5′ end, the terminal 5′ (E)-vinylphosphonate nucleotide is linked to the second nucleotide in the first strand by a phosphodiester linkage and the first strand comprises a) more than 1 phosphodiester linkage; b) phosphodiester linkages between at least the terminal three 5′ nucleotides and/or c) phosphodiester linkages between at least the terminal four 5′ nucleotides.

[0203] In one aspect, the first strand and/or the second strand of the nucleic acid comprises at least one phosphorothioate (ps) and/or at least one phosphorodithioate (ps2) linkage between two nucleotides.

[0204] In one aspect, the first strand and/or the second strand of the nucleic acid comprises more than one phosphorothioate and/or more than one phosphorodithioate linkage.

[0205] In one aspect, the first strand and/or the second strand of the nucleic acid comprises a phosphorothioate or phosphorodithioate linkage between the terminal two 3′ nucleotides or phosphorothioate or phosphorodithioate linkages between the terminal three 3′ nucleotides.

[0206] Preferably, the linkages between the other nucleotides in the first strand and/or the second strand are phosphodiester linkages.

[0207] In one aspect, the first strand and/or the second strand of the nucleic acid comprises a phosphorothioate linkage between the terminal two 5′ nucleotides or a phosphorothioate linkages between the terminal three 5′ nucleotides.

[0208] In one aspect, the nucleic acid of the present invention comprises one or more phosphorothioate or phosphorodithioate modifications on one or more of the terminal ends of the first and/or the second strand. Optionally, each or either end of the first strand may comprise one or two or three phosphorothioate or phosphorodithioate modified nucleotides (internucleoside linkage). Optionally, each or either end of the second strand may comprise one or two or three phosphorothioate or phosphorodithioate modified nucleotides (internucleoside linkage).

[0209] In one aspect, the nucleic acid comprises a phosphorothioate linkage between the terminal two or three 3′ nucleotides and/or 5′ nucleotides of the first and/or the second strand. Preferably, the nucleic acid comprises a phosphorothioate linkage between each of the terminal three 3′ nucleotides and the terminal three 5′ nucleotides of the first strand and of the second strand. Preferably, all remaining linkages between nucleotides of the first and/or of the second strand are phosphodiester linkages.

[0210] In one aspect, the nucleic acid comprises a phosphorodithioate linkage between each of the two, three or four terminal nucleotides at the 3′ end of the first strand and/or comprises a phosphorodithioate linkage between each of the two, three or four terminal nucleotides at the 3′ end of the second strand and/or a phosphorodithioate linkage between each of the two, three or four terminal nucleotides at the 5′ end of the second strand and comprises a linkage other than a phosphorodithioate linkage between the two, three or four terminal nucleotides at the 5′ end of the first strand.

[0211] In one aspect, the nucleic acid comprises a phosphorothioate linkage between the terminal three 3′ nucleotides and the terminal three 5′ nucleotides of the first strand and of the second strand. Preferably, all remaining linkages between nucleotides of the first and/or of the second strand are phosphodiester linkages.

[0212] In one aspect, the nucleic acid:
[0213] (i) has a phosphorothioate linkage between the terminal three 3′ nucleotides and the terminal three 5′ nucleotides of the first strand;
[0214] (ii) is conjugated to a triantennary ligand either on the 3′ end nucleotide or on the 5′ end nucleotide of the second strand;
[0215] (iii) has a phosphorothioate linkage between the terminal three nucleotides of the second strand at the end opposite to the one conjugated to the triantennary ligand; and
[0216] (iv) optionally all remaining linkages between nucleotides of the first and/or of the second strand are phosphodiester linkages.

[0217] In one aspect, the nucleic acid:
[0218] (i) has a terminal 5′ (E)-vinylphosphonate nucleotide at the 5′ end of the first strand;
[0219] (ii) has a phosphorothioate linkage between the terminal three 3′ nucleotides on the first and second strand and between the terminal three 5′ nucleotides on the second strand or it has a phosphorodithioate linkage between the terminal two 3′ nucleotides on the first and second strand and between the terminal two 5′ nucleotides on the second strand; and
[0220] (iii) optionally all remaining linkages between nucleotides of the first and/or of the second strand are phosphodiester linkages.

[0221] In one aspect, the nucleic acid has a terminal 5′ (E)-vinylphosphonate nucleotide at the 5′ end of the first strand and has a phosphorothioate linkage between the terminal three 3′ nucleotides on the first and between the terminal three 3′nucleotides on the second strand; and optionally all remaining linkages between nucleotides of the first and/or of the second strand are phosphodiester linkages.

[0222] The use of a phosphorodithioate linkage in the nucleic acid of the invention reduces the variation in the stereochemistry of a population of nucleic acid molecules compared to molecules comprising a phosphorothioate in that same position. Phosphorothioate linkages introduce chiral centres and it is difficult to control which non-linking oxygen is substituted for sulphur. The use of a phosphorodithioate ensures that no chiral centre exists in that linkage and thus reduces or eliminates any variation in the population of nucleic acid molecules, depending on the number of phosphorodithioate and phosphorothioate linkages used in the nucleic acid molecule.

[0223] In one aspect, the nucleic acid comprises a phosphorodithioate linkage between the two terminal nucleotides at the 3′ end of the first strand and a phosphorodithioate linkage between the two terminal nucleotides at the 3′ end of the second strand and a phosphorodithioate linkage between the two terminal nucleotides at the 5′ end of the second strand and comprises a linkage other than a phosphorodithioate linkage between the two, three or four terminal nucleotides at the 5′ end of the first strand. Preferably, the first strand has a terminal 5′ (E)-vinylphosphonate nucleotide at its 5′ end. This terminal 5′ (E)-vinylphosphonate nucleotide is preferably linked to the second nucleotide in the first strand by a phosphodiester linkage. Preferably, all the linkages between the nucleotides of both strands other than the linkage between the two terminal nucleotides at the 3′ end of the first strand and the linkages between the two terminal nucleotides at the 3′ end and at the 5′ end of the second strand are phosphodiester linkages.

[0224] In one aspect, the nucleic acid comprises a phosphorothioate linkage between each of the three terminal 3′ nucleotides and/or between each of the three terminal 5′ nucleotides on the first strand, and/or between each of the three terminal 3′ nucleotides and/or between each of the three terminal 5′ nucleotides of the second strand when there is no phosphorodithioate linkage present at that end. No phosphorodithioate linkage being present at an end means that the linkage between the two terminal nucleotides, or preferably between the three terminal nucleotides of the nucleic acid end in question are linkages other than phosphorodithioate linkages.

[0225] In one aspect, all the linkages of the nucleic acid between the nucleotides of both strands other than the linkage between the two terminal nucleotides at the 3′ end of the first strand and the linkages between the two terminal nucleotides at the 3′ end and at the 5′ end of the second strand are phosphodiester linkages.

[0226] Other phosphate linkage modifications are possible.

[0227] The phosphate linker can also be modified by replacement of a linking oxygen with nitrogen (bridged phosphoroamidates), sulfur (bridged phosphorothioates) and carbon (bridged methylenephosphonates). The replacement can occur at a terminal oxygen. Replacement of the non-linking oxygens with nitrogen is possible.

[0228] The phosphate groups can also individually be replaced by non-phosphorus containing connectors.

[0229] Examples of moieties which can replace the phosphate group include siloxane, carbonate, carboxymethyl, carbamate, amide, thioether, ethylene oxide linker, sulfonate, sulfonamide, thioformacetal, formacetal, oxime, methyleneimino, methylenemethylimino, methylenehydrazo, methylenedimethylhydrazo and methyleneoxymethylimino. In certain embodiments, replacements may include the methylenecarbonylamino and methylenemethylimino groups.

[0230] The phosphate linker and ribose sugar may be replaced by nuclease resistant nucleotides. Examples include the morpholino, cyclobutyl, pyrrolidine and peptide nucleic acid (PNA) nucleoside surrogates. In certain embodiments, PNA surrogates may be used.

[0231] In one aspect, the nucleic acid, which is preferably an siRNA that inhibits expression of MASP-2, preferably via RNAi, and preferably in a cell, comprises one or more or all of:
[0232] (i) a modified nucleotide;
[0233] (ii) a modified nucleotide other than a 2′-OMe modified nucleotide at positions 2 and 14 from the 5′ end of the first strand with a given SEQ ID No., preferably a 2′-F modified nucleotide;
[0234] (iii) each of the odd-numbered nucleotides of the first strand as numbered starting from one at the 5′ end of the first strand with a given SEQ ID No. are 2′-OMe modified nucleotides;
[0235] (iv) each of the even-numbered nucleotides of the first strand as numbered starting from one at the 5′ end of the first strand with a given SEQ ID No. are 2′-F modified nucleotides;
[0236] (v) the second strand nucleotide corresponding to position 11 and/or 13 or 11-13 of the first strand with a given SEQ ID No. is modified by a modification other than a 2′-OMe modification, preferably wherein one or both or all of these positions comprise a 2′-F modification;
[0237] (vi) an inverted nucleotide, preferably a 3′-3′ linkage at the 3′ end of the second strand with a given SEQ ID No.;
[0238] (vii) one or more phosphorothioate linkages;
[0239] (viii) one or more phosphorodithioate linkages; and/or
[0240] (ix) the first strand with a given SEQ ID No. has a terminal 5′ (E)-vinylphosphonate nucleotide at its 5′ end, in which case the terminal 5′ (E)-vinylphosphonate nucleotide is preferably a uridine and is preferably linked to the second nucleotide in the first strand by a phosphodiester linkage.

[0241] A nucleic acid of the present disclosure may comprise a first strand and a second strand, wherein the first strand sequence comprises a sequence of at least 15 nucleotides differing by no more than 3 nucleotides from any one of the first strand sequences with a given SEQ ID No. shown in Table 5b.

[0242] A nucleic acid of the present disclosure may be a nucleic acid wherein:
[0243] (a) the first strand sequence comprises a sequence differing by no more than 3 nucleotides from any one of the first strand sequences of Table 5b, and optionally wherein the second strand sequence comprises a sequence differing by no more than 3 nucleotides from the corresponding second strand sequence of Table 5b;
[0244] (b) the first strand sequence comprises a sequence differing by no more than 2 nucleotides from any one of the first strand sequences of Table 5b, and optionally wherein the second strand sequence comprises a sequence differing by no more than 2 nucleotides from the corresponding second strand sequence of Table 5b;
[0245] (c) the first strand sequence comprises a sequence differing by no more than 1 nucleotide from any one of the first strand sequences of Table 5b, and optionally wherein the second strand sequence comprises a sequence differing by no more than 1 nucleotide from the corresponding second strand sequence of Table 5b;
[0246] (d) the first strand sequence comprises a sequence corresponding to nucleotides 2 to 17 from the 5′ end of any one of the first strand sequences with a given SEQ ID No. shown in Table 5b, and optionally wherein the second strand sequence comprises a sequence corresponding to nucleotides 2 to 17 from the 5′ end of the corresponding second strand sequence with a given SEQ ID No. shown in Table 5b;
[0247] (e) the first strand sequence comprises a sequence corresponding to nucleotides 2 to 18 from the 5′ end of any one of the first strand sequences with a given SEQ ID No. shown in Table 5b, and optionally wherein the second strand sequence comprises a sequence corresponding to nucleotides 2 to 18 from the 5′ end of the corresponding second strand sequence with a given SEQ ID No. shown in Table 5b;
[0248] (f) the first strand sequence comprises a sequence corresponding to nucleotides 2 to 19 from the 5′ end of any one of the first strand sequences with a given SEQ ID No. shown in Table 5b, and optionally wherein the second strand sequence comprises a sequence corresponding to nucleotides 2 to 19 from the 5′ end of the corresponding second strand sequence with a given SEQ ID No. shown in Table 5b;
[0249] (g) the first strand sequence comprises a sequence corresponding to nucleotides 2 to 19 from the 5′ end of any one of the first strand sequences with a given SEQ ID No. shown in Table 5b, and optionally wherein the second strand sequence comprises a sequence corresponding to nucleotides 1 to 18 from the 5′ end of the corresponding second strand sequence with a given SEQ ID No. shown in Table 5b;
[0250] (h) the first strand sequence comprises a sequence of any one of the first strand sequences with a given SEQ ID No. shown in Table 5b, and optionally wherein the second strand sequence comprises a sequence of the corresponding second strand sequence with a given SEQ ID No. shown in Table 5b;
[0251] (i) the first strand sequence consists essentially of any one of the first strand sequences with a given SEQ ID No. shown in Table 5b, and optionally wherein the second strand sequence consists of the sequence of the corresponding second strand sequence with a given SEQ ID No. shown in Table 5b;
[0252] (j) the first strand sequence consists of any one of the first strand sequences with a given SEQ ID No. shown in Table 5b, and optionally wherein the second strand sequence consists of the sequence of the corresponding second strand sequence with a given SEQ ID No. shown in Table 5b;
[0253] (k) the first strand sequence consists of a sequence corresponding to nucleotides 1 to 19 from the 5′ end of any one of the first strand sequences with a given SEQ ID No. shown in Table 5b,
   [0254] wherein said first strand sequence further consists of 1 (nucleotide 20 counted from the 5′end), 2 (nucleotides 20 and 21), 3 (nucleotides 20, 21 and 22), 4 (nucleotides 20, 21, 22 and 23), 5 (nucleotides 20, 21, 22, 23 and 24) or 6 (nucleotides 20, 21, 22, 23, 24 and 25) additional nucleotide(s) at the 3′end of any one of the first strand sequences with a given SEQ ID No. shown in Table 5b, and
   [0255] optionally wherein the second strand sequence comprises or consists essentially of or consists of a sequence of the corresponding second strand sequence with a given SEQ ID No. shown in Table 5b;
[0256] (l) the first strand sequence consists of a sequence corresponding to nucleotides 1 to 19 from the 5′ end of any one of the first strand sequences with a given SEQ ID No. shown in Table 5b,
   [0257] wherein said first strand sequence further consists of 1 (nucleotide 20 counted from the 5′end), 2 (nucleotides 20 and 21), 3 (nucleotides 20, 21 and 22), 4 (nucleotides 20, 21, 22 and 23), 5 (nucleotides 20, 21, 22, 23 and 24) or 6 (nucleotides 20, 21, 22, 23, 24 and 25) additional nucleotide(s) at the 3′end of any one of the first strand sequences with a given SEQ ID No. shown in Table 5b, and
   [0258] wherein said first strand sequence consists of a contiguous region of from 17-25 nucleotides in length, preferably of from 18-24 nucleotides in length, complementary to the MASP-2 transcript of SEQ ID NO. 821, and
   [0259] optionally wherein the second strand sequence comprises or consists essentially of or consists of a sequence of the corresponding second strand sequence with a given SEQ ID No. shown in Table 5b;
[0260] (m) the first strand and the second strand of any one of the nucleic acid molecules of subsections (a) to (l) above are present on a single strand wherein the first strand and the second strand are able to hybridise to each other and to thereby form a double-stranded nucleic acid with a duplex region of 17, 18, 19, 20, 21, 22, 23, 24 or 25 nucleotides in length; or
[0261] (n) the first strand and the second strand of any one of the nucleic acid molecules of subsections (a) to (l) above are on two separate strands that are able to hybridise to each other and to thereby form a double-stranded nucleic acid with a duplex region of 17, 18, 19, 20, 21, 22, 23, 24 or 25 nucleotides in length.

[0262] A nucleic acid of the present disclosure may comprise a first strand and a second strand, wherein the first strand sequence comprises a sequence of at least 15 nucleotides differing by no more than 3 nucleotides from any one of the first strand sequences with a given SEQ ID No. shown in Table 2.

TABLE 2

| First strand | Second strand |
|---|---|
| sequence (SEQ ID No.) | sequence (SEQ ID No.) |
| 794 | 816 |
| 774 | 775 |
| 798 | 817 |
| 800 | 818 |
| 802 | 788 |
| 804 | 789 |
| 776 | 777 |
| 778 | 779 |
| 780 | 781 |
| 782 | 783 |
| 804 | 820 |
| 806 | 807 |
| 810 | 811 |

[0263] A nucleic acid of the present disclosure may comprise a first strand and a second strand, wherein the first strand sequence comprises a sequence of at least 17 nucleotides differing by no more than 3 nucleotides from any one of the first strand sequences with a given SEQ ID No. shown in Table 2.

[0264] A nucleic acid of the present disclosure may comprise a first strand and a second strand, wherein the first strand sequence comprises a sequence of at least 17 nucleotides differing by no more than 2 nucleotides from any one of the first strand sequences with a given SEQ ID No. shown in Table 2.

[0265] A nucleic acid of the present disclosure may comprise a first strand and a second strand, wherein the first strand sequence comprises a sequence of at least 17 nucleotides differing by no more than 1 nucleotide from any one of the first strand sequences with a given SEQ ID No. shown in Table 2.

[0266] A nucleic acid of the present disclosure may comprise a first strand and a second strand, wherein the first strand sequence comprises a sequence of at least 18 nucleotides differing by no more than 3 nucleotides from any one of the first strand sequences with a given SEQ ID No. shown in Table 2.

[0267] A nucleic acid of the present disclosure may comprise a first strand and a second strand, wherein the first strand sequence comprises a sequence of at least 18 nucleotides differing by no more than 2 nucleotides from any one of the first strand sequences with a given SEQ ID No. shown in Table 2.

[0268] A nucleic acid of the present disclosure may comprise a first strand and a second strand, wherein the first strand sequence comprises a sequence of at least 18 nucleotides differing by no more than 1 nucleotide from any one of the first strand sequences with a given SEQ ID No. shown in Table 2.

[0269] A nucleic acid of the present disclosure may comprise a first strand and a second strand, wherein the first strand sequence comprises a sequence of at least 19 nucleotides differing by no more than 3 nucleotides from any one of the first strand sequences with a given SEQ ID No. shown in Table 2.

[0270] A nucleic acid of the present disclosure may comprise a first strand and a second strand, wherein the first strand sequence comprises a sequence of at least 19 nucleotides differing by no more than 2 nucleotides from any one of the first strand sequences with a given SEQ ID No. shown in Table 2.

[0271] A nucleic acid of the present disclosure may comprise a first strand and a second strand, wherein the first strand sequence comprises a sequence of at least 19 nucleotides differing by no more than 1 nucleotide from any one of the first strand sequences with a given SEQ ID No. shown in Table 2.

[0272] A nucleic acid of the present disclosure may comprise a first strand and a second strand, wherein the first strand sequence consists essentially of, or consists of a sequence from any one of the first strand sequences with a given SEQ ID No. shown in Table 2.

[0273] For example, a nucleic acid of the present disclosure may be a nucleic acid wherein:
[0274] (a) the first strand sequence comprises a sequence differing by no more than 3 nucleotides from any one of the first strand sequences of Table 2, and optionally wherein the second strand sequence comprises a sequence differing by no more than 3 nucleotides from the corresponding second strand sequence of Table 2;
[0275] (b) the first strand sequence comprises a sequence differing by no more than 2 nucleotides from any one of the first strand sequences of Table 2, and optionally wherein the second strand sequence comprises a sequence differing by no more than 2 nucleotides from the corresponding second strand sequence of Table 2;
[0276] (c) the first strand sequence comprises a sequence differing by no more than 1 nucleotide from any one of the first strand sequences of Table 2, and optionally wherein the second strand sequence comprises a sequence differing by no more than 1 nucleotide from the corresponding second strand sequence of Table 2;
[0277] (d) the first strand sequence comprises a sequence corresponding to nucleotides 2 to 17 from the 5′ end of any one of the first strand sequences with a given SEQ ID No. shown in Table 2, and optionally wherein the second strand sequence comprises a sequence corresponding to nucleotides 2 to 17 from the 5′ end of the corresponding second strand sequence with a given SEQ ID No. shown in Table 2;
[0278] (e) the first strand sequence comprises a sequence corresponding to nucleotides 2 to 18 from the 5′ end of any one of the first strand sequences with a given SEQ ID No. shown in Table 2, and optionally wherein the second strand sequence comprises a sequence corresponding to nucleotides 2 to 18 from the 5′ end of the corresponding second strand sequence with a given SEQ ID No. shown in Table 2;
[0279] (f) the first strand sequence comprises a sequence corresponding to nucleotides 2 to 19 from the 5′ end of any one of the first strand sequences with a given SEQ ID No. shown in Table 2, and optionally wherein the second strand sequence comprises a sequence corresponding to nucleotides 2 to 19 from the 5′ end of the corresponding second strand sequence with a given SEQ ID No. shown in Table 2;
[0280] (g) the first strand sequence comprises a sequence corresponding to nucleotides 2 to 19 from the 5′ end of any one of the first strand sequences with a given SEQ ID No. shown in Table 2, and optionally wherein the second strand sequence comprises a sequence corresponding to nucleotides 1 to 18 from the 5′ end of the corresponding second strand sequence with a given SEQ ID No. shown in Table 2;
[0281] (h) the first strand sequence comprises a sequence of any one of the first strand sequences of Table 2, and optionally wherein the second strand sequence comprises a sequence of the corresponding second strand sequence of Table 2;
[0282] (i) the first strand sequence consists essentially of any one of the first strand sequences of Table 2, and optionally wherein the second strand sequence consists essentially of the sequence of the corresponding second strand sequence of Table 2;
[0283] (j) the first strand sequence consists of any one of the first strand sequences of Table 2, and optionally wherein the second strand sequence consists of the sequence of the corresponding second strand sequence of Table 2;
[0284] (k) the first strand sequence consists of a sequence corresponding to nucleotides 1 to 19 from the 5′ end of any one of the first strand sequences with a given SEQ ID No. shown in Table 2,
   [0285] wherein said first strand sequence further consists of 1 (nucleotide 20 counted from the 5′end), 2 (nucleotides 20 and 21), 3 (nucleotides 20, 21 and 22), 4 (nucleotides 20, 21, 22 and 23), 5 (nucleotides 20, 21, 22, 23 and 24) or 6 (nucleotides 20, 21, 22, 23, 24 and 25) additional nucleotide(s) at the 3′end of any one of the first strand sequences with a given SEQ ID No. shown in Table 2, and
   [0286] optionally wherein the second strand sequence comprises or consists essentially of or consists of a sequence of the corresponding second strand sequence with a given SEQ ID No. shown in Table 2;
[0287] (l) the first strand sequence consists of a sequence corresponding to nucleotides 1 to 19 from the 5′ end of any one of the first strand sequences with a given SEQ ID No. shown in Table 2,
   [0288] wherein said first strand sequence further consists of 1 (nucleotide 20 counted from the 5′end), 2 (nucleotides 20 and 21), 3 (nucleotides 20, 21 and 22), 4 (nucleotides 20, 21, 22 and 23), 5 (nucleotides 20, 21, 22, 23 and 24) or 6 (nucleotides 20, 21, 22, 23, 24 and 25) additional nucleotide(s) at the 3′end of any one of the first strand sequences with a given SEQ ID No. shown in Table 2, and
   [0289] wherein said first strand sequence consists of a contiguous region of from 17-25 nucleotides in length, preferably of from 18-24 nucleotides in length, complementary to the MASP-2 transcript of SEQ ID NO. 821, and
   [0290] optionally wherein the second strand sequence comprises or consists essentially of or consists of a sequence of the corresponding second strand sequence with a given SEQ ID No. shown in Table 2;
[0291] (m) the first strand and the second strand of any one of the nucleic acid molecules of subsections (a) to (l) above are present on a single strand wherein the first strand and the second strand are able to hybridise to each other and to thereby form a double-stranded nucleic acid with a duplex region of 17, 18, 19, 20, 21, 22, 23, 24 or 25 nucleotides in length; or
[0292] (n) the first strand and the second strand of any one of the nucleic acid molecules of subsections (a) to (l) above are on two separate strands that are able to hybridise to each other and to thereby form a double-stranded nucleic acid with a duplex region of 17, 18, 19, 20, 21, 22, 23, 24 or 25 nucleotides in length.

[0293] All the features of the nucleic acids can be combined with all other aspects of the invention disclosed herein.

### Heterologous Moieties

[0294] The nucleic acids of the invention may be conjugated to a heterologous moiety. A heterologous moiety is any moiety which is not a nucleic acid molecule capable of inhibiting expression of MASP-2. A heterologous moiety may be, or may comprise, a peptide (or polypeptide), a saccharide (or polysaccharide), a lipid, a different nucleic acid, or any other suitable molecule.

[0295] Any given nucleic acid may be conjugated to a plurality of heterologous moieties, which may be the same or different.

[0296] An individual heterologous moiety may itself comprise one or more functional moieties (such as targeting agents as described in more detail below), each optionally covalently associated to the nucleic acid via a linker.

[0297] A heterologous moiety, or the functional component thereof, may serve for example to modulate bioavailability or pharmacokinetics. For example, it may increase half-life in vivo. Alternatively, a heterologous moiety (or the functional component thereof) may comprise a targeting agent. Efficient delivery of oligonucleotides, in particular double-stranded nucleic acids of the invention, to cells in vivo is important and requires specific targeting and substantial protection from the extracellular environment, particularly serum proteins. One method of achieving specific targeting is to conjugate a targeting agent to the nucleic acid, wherein the targeting agent helps in targeting the nucleic acid to a target cell which has a cell surface receptor that binds to the targeting agent.

[0298] In this context, the term “receptor” is used to include any molecule on the surface of a target cell capable of binding to the targeting agent, and should not be taken to imply any particular function for the cell surface receptor. The targeting agent may be regarded as a “ligand” for the cell surface receptor. The terms “targeting agent” and “ligand” may be used interchangeably. Again, this terminology should not be taken to imply any particular function for the targeting agent or the cell surface receptor, or any particular relationship between the two molecules other than the ability of one to bind to the other.

[0299] Thus, the targeting agent may be any moiety having affinity for the chosen receptor. It may, for example, be an affinity protein (such as an antibody or a fragment thereof having affinity for the chosen receptor), an aptamer, or any other suitable moiety. In some embodiments, the targeting agent may be a physiological ligand for the receptor.

[0300] Binding between the targeting agent and the receptor may promote uptake of the conjugated nucleic acid by the target cell, e.g., via internalisation of the receptor, or any other suitable mechanism. Thus, appropriate ligands for the desired receptor molecules may be used as targeting agents in order for the conjugated nucleic acids to be taken up by the target cells by mechanisms such as different receptor-mediated endocytosis pathways or functionally analogous processes. In other embodiments, a ligand which can mediate internalization of the nucleic acid into a target cell by mechanisms other than receptor mediated endocytosis may alternatively be conjugated to a nucleic acid of the invention for cell or tissue specific targeting.

[0301] One example of a ligand that mediates receptor mediated endocytosis is the GalNAc moiety described herein, which has high affinity to the asialoglycoprotein receptor complex (ASGP-R). The ASGP-R complex is composed of varying ratios of multimers of membrane ASGR1 and ASGR2 receptors, which are highly abundant on hepatocytes. One of the first disclosures of the use of triantennary cluster glycosides as conjugated ligands was in U.S. Pat. No. 5,885,968. Conjugates having three GalNAc ligands and comprising phosphate groups are known and are described in Dubber et al. (Bioconjug. Chem. 2003 January-February; 14(1):239-46.). The ASGP-R complex shows a 50-fold higher affinity for N-Acetyl-D-Galactosamine (GalNAc) than D-Gal.

[0302] The ASGP-R complex recognizes specifically terminal β-galactosyl subunits of glycosylated proteins or other oligosaccharides (Weigel, P. H. et. al., Biochim. Biophys. Acta. 2002 Sep. 19; 1572(2-3):341-63) and can be used for delivering a drug to the liver's hepatocytes expressing the receptor complex by covalent coupling of galactose or galactosamine to the drug substance (Ishibashi, S.; et. al., J Biol. Chem. 1994 Nov. 11; 269(45):27803-6). Furthermore, the binding affinity can be significantly increased by the multi-valency effect, which is achieved by the repetition of the targeting moiety (Biessen E A, et al., J Med Chem. 1995 Apr. 28; 38(9):1538-46).

[0303] The ASGP-R complex is a mediator for an active uptake of terminal β-galactosyl containing glycoproteins to the cell's endosomes. Thus, the ASGPR is highly suitable for targeted delivery of drug candidates conjugated to such ligands like, e.g., nucleic acids into receptor-expressing cells (Akinc et al., Mol Ther. 2010 July; 18(7):1357-64).

[0304] More generally the ligand can comprise a saccharide that is selected to have an affinity for at least one type of receptor on a target cell. In particular, the receptor is on the surface of a mammalian liver cell, for example, the hepatic asialoglycoprotein receptor complex described before (ASGP-R).

[0305] The saccharide may be selected from N-acetyl galactosamine, mannose, galactose, glucose, glucosamine and fucose. The saccharide may be N-acetyl galactosamine (GalNAc). The heterologous moiety may comprise a plurality of such saccharides, e.g., two or especially three such saccharides, e.g., three GalNAc groups.

[0306] A heterologous moiety may therefore comprise (i) one or more functional components, and (ii) a linker, wherein the linker conjugates the functional components to a nucleic acid as defined in any preceding aspects. The linker may be a monovalent structure or bivalent or trivalent or tetravalent branched structure. The nucleotides may be modified as defined herein.

[0307] The functional components may therefore be ligands (or targeting agents). Where multiple functional components are present, they may be the same or different. Where the functional components are ligands, they may be saccharides, and may therefore be (or comprise) GalNAc.

[0308] In one aspect, the nucleic acid is conjugated to a heterologous moiety comprising a compound of formula (II):

[S—X¹—P—X²]₃-A-X³— (II)

wherein:
[0309] S represents a functional component, e.g., a ligand, such as a saccharide, preferably wherein the saccharide is N-acetyl galactosamine;
[0310] X¹ represents C₃-C₆ alkylene or (—CH₂—CH₂—O)m(—CH₂)₂— wherein m is 1, 2, or 3;
[0311] P is a phosphate or modified phosphate, preferably a thiophosphate;
[0312] X² is alkylene or an alkylene ether of the formula (—CH₂)ₙ—O—CH₂— where n=1-6;
[0313] A is a branching unit;
[0314] X³ represents a bridging unit;
[0315] wherein a nucleic acid according to the present invention is conjugated to X³ via a phosphate or modified phosphate, preferably a thiophosphate.

[0316] In formula (II), the branching unit “A” preferably branches into three in order to accommodate three saccharide ligands. The branching unit is preferably covalently attached to the remaining tethered portions of the ligand and the nucleic acid. The branching unit may comprise a branched aliphatic group comprising groups selected from alkyl, amide, disulphide, polyethylene glycol, ether, thioether and hydroxyamino groups. The branching unit may comprise groups selected from alkyl and ether groups.

[0317] The branching unit A may have a structure selected from:

[chemical structure]

wherein each A₁ independently represents O, S, C═O or NH; and each n independently represents an integer from 1 to 20.

[0318] The branching unit may have a structure selected from:

[chemical structure]

wherein each A₁ independently represents O, S, C═O or NH; and each n independently represents an integer from 1 to 20.

[0319] The branching unit may have a structure selected from:

[chemical structure]

wherein A₁ is O, S, C═O or NH; and each n independently represents an integer from 1 to 20. The branching unit may have the structure:

[chemical structure]

[0320] The branching unit may have the structure:

[chemical structure]

[0321] The branching unit may have the structure:

[chemical structure]

[0322] Alternatively, the branching unit A may have a structure selected from:

[chemical structure]

wherein:
[0323] R1 is hydrogen or C1-C10 alkylene;
[0324] and R2 is C1-C10 alkylene.

[0325] Optionally, the branching unit consists of only a carbon atom.

[0326] The “X³” portion is a bridging unit. The bridging unit is linear and is covalently bound to the branching unit and the nucleic acid.

[0327] X³ may be selected from —C₁-C₂₀ alkylene-, —C₂-C₂₀ alkenylene-, an alkylene ether of formula —(C₁-C₂₀ alkylene)-O—(C₁-C₂₀ alkylene)-, —C(O)—C₁-C₂₀ alkylene-, —C₀-C₄ alkylene(Cy)C₀-C₄ alkylene- wherein Cy represents a substituted or unsubstituted 5 or 6 membered cycloalkylene, arylene, heterocyclylene or heteroarylene ring, —C₁-C₄ alkylene-NHC(O)—C₁-C₄ alkylene-, —C₁-C₄ alkylene-C(O)NH—C₁-C₄ alkylene-, —C₁-C₄ alkylene-SC(O)—C₁-C₄ alkylene-, —C₁-C₄ alkylene-C(O)S—C₁-C₄ alkylene-, —C₁-C₄ alkylene-OC(O)—C₁-C₄ alkylene-, —C₁-C₄ alkylene-C(O)O—C₁-C₄ alkylene-, and —C₁-C₆ alkylene-S—S—C₁-C₆ alkylene-.

[0328] X³ may be an alkylene ether of formula —(C₁-C₂₀ alkylene)-O—(C₁-C₂₀ alkylene)-. X³ may be an alkylene ether of formula —(C₁-C₂₀ alkylene)-O—(C₄-C₂₀ alkylene)-, wherein said (C₄-C₂₀ alkylene) is linked to Z. X³ may be selected from the group consisting of —CH₂—O—C₃H₆—, —CH₂—O—C₄H₈—, —CH₂—O—C₆H₁₂— and —CH₂—O—C₈H₁₆—, especially —CH₂—O—C₄H₈—, —CH₂—O—C₆H₁₂— and —CH₂—O—C₈H₁₆—, wherein in each case the —CH₂— group is linked to A.

[0329] In one aspect, the nucleic acid is conjugated to a heterologous moiety of formula (III):

[S—X¹—P—X²]₃-A-X³— (III)

wherein:
[0330] S represents a functional component, e.g., a ligand, such as a saccharide, preferably GalNAc;
[0331] X¹ represents C₃-C₆ alkylene or (—CH₂—CH₂—O)ₘ(—CH₂)₂— wherein m is 1, 2, or 3;
[0332] P is a phosphate or modified phosphate, preferably a thiophosphate;
[0333] X² is C₁-C₈ alkylene;
[0334] A is a branching unit selected from:

[chemical structure]

[0335] X³ is a bridging unit;
[0336] wherein a nucleic acid according to the present invention is conjugated to X³ via a phosphate or a modified phosphate, preferably a thiophosphate.

[0337] The branching unit A may have the structure:

[chemical structure]

[0338] The branching unit A may have the structure:

[chemical structure]

wherein X³ is attached to the nitrogen atom.

[0339] X³ may be C₁-C₂₀ alkylene. Preferably, X³ is selected from the group consisting of —C₃H₆—, —C₄H₈—, —C₆H₁₂— and —C₈H₁₆—, especially —C₄H₈—, —C₆H₁₂— and —C₈H₁₆—.

[0340] In one aspect, the nucleic acid is conjugated to a ligand comprising a compound of formula (IV):

[S—X¹—P—X²]₃-A-X³— (IV)

wherein:
[0341] S represents a functional component, e.g., a ligand, such as a saccharide, preferably GalNAc;
[0342] X¹ represents C₃-C₆ alkylene or (—CH₂—CH₂—O)ₘ(—CH₂)₂— wherein m is 1, 2, or 3;
[0343] P is a phosphate or modified phosphate, preferably a thiophosphate;
[0344] X² is an alkylene ether of formula —C₃H₆—O—CH₂—;
[0345] A is a branching unit;
[0346] X³ is an alkylene ether of formula selected from the group consisting of —CH₂—O—CH₂—, —CH₂—O—C₂H₄—, —CH₂—O—C₃H₆—, —CH₂—O—C₄H₈—, —CH₂—O—C₅H₁₀—, —CH₂—O—C₆H₁₂—, —CH₂—O—C₇H₁₄—, and —CH₂—O—C₈H₁₆—, wherein in each case the —CH₂— group is linked to A,
[0347] and wherein X³ is conjugated to a nucleic acid according to the present invention by a phosphate or modified phosphate, preferably a thiophosphate.

[0348] The branching unit may comprise carbon. Preferably, the branching unit is a carbon.

[0349] X³ may be selected from the group consisting of —CH₂—O—C₄H₈—, —CH₂—O—C₅H₁₀—, —CH₂—O—C₆H₁₂—, —CH₂—O—C₇H₁₄—, and —CH₂—O—C₈H₁₆—. Preferably, X³ is selected from the group consisting of —CH₂—O—C₄H₈—, —CH₂—O—C₆H₁₂— and —CH₂—O—C₈H₁₆.

[0350] X¹ may be (—CH₂—CH₂—O)(—CH₂)₂—. X¹ may be (—CH₂—CH₂—O)₂(—CH₂)₂—. X¹ may be (—CH₂—CH₂—O)₃(—CH₂)₂—. Preferably, X¹ is (—CH₂—CH₂—O)₂(—CH₂)₂—. Alternatively, X¹ represents C₃-C₆ alkylene. X¹ may be propylene. X¹ may be butylene. X¹ may be pentylene. X¹ may be hexylene. Preferably the alkyl is a linear alkylene. In particular, X¹ may be butylene.

[0351] X² represents an alkylene ether of formula —C₃H₆—O—CH₂— i.e., C₃ alkoxy methylene, or —CH₂CH₂CH₂OCH₂—.

[0352] For any of the above aspects, when P represents a modified phosphate group, P can be represented by:

[chemical structure]

wherein Y¹ and Y² each independently represent ═O, ═S, —O—, —OH, —SH, —BH₃, —OCH₂CO₂, —OCH₂CO₂R^{x}, —OCH₂C(S)OR^{x}, and —OR^{x}, wherein R^{x} represents C₁-C₆ alkyl and wherein [symbol] indicates attachment to the remainder of the compound.

[0353] By modified phosphate it is meant a phosphate group wherein one or more of the non-linking oxygens is replaced. Examples of modified phosphate groups include phosphorothioate, phosphorodithioates, phosphoroselenates, borano phosphates, borano phosphate esters, hydrogen phosphonates, phosphoroamidates, alkyl or aryl phosphonates and phosphotriesters. Phosphorodithioates have both non-linking oxygens replaced by sulphur. One, each or both non-linking oxygens in the phosphate group can be independently any one of S, Se, B, C, H, N, or OR (R is alkyl or aryl).

[0354] The phosphate can also be modified by replacement of a linking oxygen with nitrogen (bridged phosphoroamidates), sulfur (bridged phosphorothioates) and carbon (bridged methylenephosphonates). The replacement can occur at a terminal oxygen. Replacement of the non-linking oxygens with nitrogen is possible.

[0355] For example, Y¹ may represent —OH and Y² may represent ═O or ═S; or
[0356] Y¹ may represent —O— and Y² may represent ═O or ═S;
[0357] Y¹ may represent ═O and Y² may represent —CH₃, —SH, —OR^{x}, or —BH₃
[0358] Y¹ may represent ═S and Y² may represent —CH₃, OR^{x} or —SH.

[0359] It will be understood by the skilled person that in certain instances there will be delocalisation between Y¹ and Y².

[0360] Preferably, the modified phosphate group is a thiophosphate group. Thiophosphate groups include bithiophosphate (i.e., where Y¹ represents ═S and Y² represents —S—) and monothiophosphate (i.e., where Y¹ represents —O— and Y² represents ═S, or where Y¹ represents ═O and Y² represents —S—). Preferably, P is a monothiophosphate. The inventors have found that conjugates having thiophosphate groups in replacement of phosphate groups have improved potency and duration of action in vivo.

[0361] P may also be an ethylphosphate (i.e., where Y¹ represents ═O and Y² represents OCH₂CH₃).

[0362] The ligand, e.g., saccharide, may be selected to have an affinity for at least one type of receptor on a target cell. In particular, the receptor is on the surface of a mammalian liver cell, for example, the hepatic asialoglycoprotein receptor complex (ASGP-R).

[0363] For any of the above or below aspects, the saccharide may be selected from N-acetyl with one or more of galactosamine, mannose, galactose, glucose, glucosamine and fructose. Typically, a ligand to be used in the present invention may include N-acetyl galactosamine (GalNAc). Preferably the compounds of the invention may have 3 ligands, which will each preferably include N-acetyl galactosamine.

[0364] “GalNAc” refers to 2-(Acetylamino)-2-deoxy-D-galactopyranose, commonly referred to in the literature as N-acetyl galactosamine. Reference to “GalNAc” or “N-acetyl galactosamine” includes both the β-form: 2-(Acetylamino)-2-deoxy-β-D-galactopyranose and the α-form: 2-(Acetylamino)-2-deoxy-α-D-galactopyranose. In certain embodiments, both the β-form: 2-(Acetylamino)-2-deoxy-β-D-galactopyranose and α-form: 2-(Acetylamino)-2-deoxy-α-D-galactopyranose may be used interchangeably. Preferably, the compounds of the invention comprise the β-form, 2-(Acetylamino)-2-deoxy-β-D-galactopyranose.

[chemical structure]

[0365] In one aspect, the nucleic acid is a conjugated nucleic acid, wherein the nucleic acid is conjugated to a heterologous moiety with one of the following structures, which may be referred to as “triantennary ligands” for ease of reference:

[chemical structure]

[chemical structure]

[chemical structure]

[chemical structure]

wherein Z is any nucleic acid as defined herein.

[0366] In certain embodiments the nucleic acid Z is conjugated to the triantennary ligand via the phosphate or thiophosphate group which links the triantennary ligand to the 3′ or 5′ position of the sugar, particularly to the 3′ or 5′ position of the ribose, of the terminal nucleotide of said nucleic acid Z.

[0367] In certain embodiments the heterologous moiety (“triantennary ligand”) is conjugated to the 3′ position of the ribose of the terminal nucleotide of the second (sense) strand of Z (which is also referred to as strand “B” in Tables 5a, 5b, 5c).

[0368] In other embodiments, the heterologous moiety (“triantennary ligand”) is conjugated to the 5′ position of the ribose of the terminal nucleotide of the second (sense) strand of Z (which is also referred to as strand “B” in Tables 5a, 5b, 5c).

[0369] In other embodiments, the heterologous moiety (“triantennary ligand”) is conjugated to the 3′ position of the ribose of the terminal nucleotide of the first (antisense) strand of Z (which is also referred to as strand “A” in Tables 5a, 5b, 5c).

[0370] Preferably, the nucleic acid is a conjugated nucleic acid, wherein the nucleic acid is conjugated to a triantennary ligand with one of the following structures:

[chemical structure]

wherein Z is any nucleic acid as defined herein.

[0371] In a preferred embodiment the nucleic acid Z is conjugated to the triantennary ligand via the phosphate or thiophosphate group which links the triantennary ligand to the 3′ or 5′ position of the ribose of the terminal nucleotide of said nucleic acid Z.

[0372] Preferably, the triantennary ligand” is conjugated to the 5′ position of the ribose of the terminal nucleotide of the second (sense) strand of Z (which is also referred to as strand “B” in Tables 5a. 5b. 5c).

[0373] A heterologous moiety of formula (II), (III) or (IV) or any one of the triantennary ligands disclosed herein can be attached at the 3′-end of the first (antisense) strand and/or at any of the 3′ and/or 5′ end of the second (sense) strand. The nucleic acid can comprise more than one heterologous moiety of formula (II), (III) or (IV) or any one of the triantennary ligands disclosed herein. However, a single heterologous moiety of formula (II), (III) or (IV) or any one of the triantennary ligands disclosed herein is preferred because a single such moiety is sufficient for efficient targeting of the nucleic acid to the target cells. Preferably in that case, at least the last two, preferably at least the last three and more preferably at least the last four nucleotides at the end of the nucleic acid to which the ligand is attached are linked by a phosphodiester linkage.

[0374] Preferably, the 5′-end of the first (antisense) strand is not attached to a heterologous moiety, since attachment at this position can potentially interfere with the biological activity of the nucleic acid.

[0375] A nucleic acid with a single heterologous moiety (e.g., of formula (II), (III) or (IV) or any one of the triantennary ligands disclosed herein) at the 5′ end of a strand is easier and therefore cheaper to synthesise than the same nucleic acid with the same group at the 3′ end. Preferably therefore, a single heterologous moiety (e.g., of any of formulae (II), (III) or (IV) or any one of the triantennary ligands disclosed herein) is covalently attached to (conjugated with) the 5′ end of the second strand of the nucleic acid.

[0376] In one aspect, the first strand of the nucleic acid is a compound of formula (V):

[chemical structure]

[0377] wherein b is preferably 0 or 1; and
   the second strand is a compound of formula (VI):

[chemical structure]

wherein:
[0378] c and d are independently preferably 0 or 1;
[0379] Z₁ and Z₂ are respectively the first and second strand of the nucleic acid;
[0380] Y is independently O or S;
[0381] n is independently 0, 1, 2 or 3; and
[0382] L₁ is a linker to which a ligand is attached, wherein L₁ is the same or different in formulae (V) and (VI), and is the same or different within formulae (V) and (VI) when L₁ is present more than once within the same formula, wherein L₁ is preferably of formula (VII);
   and wherein b+c+d is preferably 2 or 3.

[0383] Preferably, L₁ in formulae (V) and (VI) is of formula (VII):

[chemical structure]

wherein:
[0384] L is selected from the group comprising, or preferably consisting of:
   [0385] —(CH₂)ᵣC(O)—, wherein r=2-12;
   [0386] —(CH₂—CH₂—O)ₛ—CH₂—C(O)—, wherein s=1-5;
   [0387] —(CH₂)ₜ—CO—NH—(CH₂)ᵣ—NH—C(O)—, wherein t is independently 1-5;
   [0388] —(CH₂)ᵤ—CO—NH—(CH₂)ᵤ—C(O)—, wherein u is independently 1-5; and
   [0389] —(CH₂)ᵥ—NH—C(O)—, wherein v is 2-12; and
[0390] wherein the terminal C(O), if present, is attached to X of formula (VII), or if X is absent, to W₁ of formula (VII), or if W₁ is absent, to V of formula (VII);
[0391] W₁, W₃ and W₅ are individually absent or selected from the group comprising, or preferably consisting of:
   [0392] —(CH₂)ᵣ, wherein r=1-7;
   [0393] —(CH₂)ₛ—O—(CH₂)ₛ—, wherein s is independently 0-5;
   [0394] —(CH₂)ₜ—S—(CH₂)ₜ—, wherein t is independently 0-5;
[0395] X is absent or is selected from the group comprising, or preferably consisting of: NH, NCH₃ or NC₂H₅;
[0396] V is selected from the group comprising, or preferably consisting of:
[0397] CH, N,

[chemical structure]

[0398] wherein B, if present, is a modified or natural nucleobase.

[0399] In one aspect, the first strand is a compound of formula (VIII)

[chemical structure]

[0400] wherein b is preferably 0 or 1; and
   the second strand is a compound of formula (IX):

[chemical structure]

[0401] wherein c and d are independently preferably 0 or 1;
   wherein:
[0402] Z₁ and Z₂ are respectively the first and second strand of the nucleic acid;
[0403] Y is independently O or S;
[0404] R₁ is H or methyl;
[0405] n is independently preferably 0, 1, 2 or 3; and
[0406] L is the same or different in formulae (VIII) and (IX), and is the same or different within formulae (VIII) and (IX) when L is present more than once within the same formula, and is selected from the group comprising, or preferably consisting of:
   [0407] —(CH₂)ᵣ—C(O)—, wherein r=2-12;
   [0408] —(CH₂—CH₂—O)S—CH₂—C(O)—, wherein s=1-5;
   [0409] —(CH₂)ₜ—CO—NH—(CH₂)ₜ—NH—C(O)—, wherein t is independently 1-5;
   [0410] —(CH₂)ᵤ—CO—NH—(CH₂)ᵤ—C(O)—, wherein u is independently 1-5; and
   [0411] —(CH₂)ᵥ—NH—C(O)—, wherein v is 2-12; and
[0412] wherein the terminal C(O), if present, is attached to the NH group (of the linker, not of the targeting ligand);
   and wherein b+c+d is preferably 2 or 3.

[0413] In one aspect, the first strand of the nucleic acid is a compound of formula (X):

[chemical structure]

[0414] wherein b is preferably 0 or 1; and
   the second strand is a compound of formula (XI):

[chemical structure]

wherein:
[0415] c and d are independently preferably 0 or 1;
[0416] Z₁ and Z₂ are respectively the first and second RNA strand of the nucleic;
[0417] Y is independently O or S;
[0418] n is independently preferably 0, 1, 2 or 3; and
[0419] L₂ is the same or different in formulae (X) and (XI) and is the same or different in moieties bracketed by b, c and d, and is selected from the group comprising, or preferably consisting of:

[chemical structure]

or
[0420] n is 0 and L₂ is:

[chemical structure]

[0421] and the terminal OH group is absent such that the following moiety is formed:

[chemical structure]

[0422] wherein:
[0423] F is a saturated branched or unbranched (such as unbranched) C₁₋₆alkyl (e.g., C₁₋₆alkyl) chain wherein one of the carbon atoms is optionally replaced with an oxygen atom provided that said oxygen atom is separated from another heteroatom (e.g. an O or N atom) by at least 2 carbon atoms;
[0424] L is the same or different in formulae (X) and (XI) and is selected from the group comprising, or preferably consisting of:
   [0425] —(CH₂)ᵣC(O)—, wherein r=2-12;
   [0426] —(CH₂—CH₂—O)ₛ—CH₂—C(O)—, wherein s=1-5;
   [0427] —(CH₂)ₜ—CO—NH—(CH₂)ₜ—NH—C(O)—, wherein t is independently 1-5;
   [0428] —(CH₂)ᵤ—CO—NH—(CH₂)ᵤ—C(O)—, wherein u is independently 1-5; and
   [0429] —(CH₂)ᵥ—NH—C(O)—, wherein v is 2-12; and
[0430] wherein the terminal C(O), if present, is attached to the NH group (of the linker, not of the targeting ligand);
   and wherein b+c+d is preferably 2 or 3.

[0431] In one aspect, b is 0, c is 1 and d is 1; b is 1, c is 0 and d is 1; b is 1, c is 1 and d is 0; or b is 1, c is 1 and d is 1 in any of the nucleic acids of formulae (V) and (VI) or (VIII) and (IX) or (X) and (XI). Preferably, b is 0, c is 1 and d is 1; b is 1, c is 0 and d is 1; or b is 1, c is 1 and d is 1. Most preferably, b is 0, c is 1 and d is 1.

[0432] In one aspect, Y is O in any of the nucleic acids of formulae (V) and (VI) or (VIII) and (IX) or (X) and (XI). In another aspect, Y is S. In a preferred aspect, Y is independently selected from O or S in the different positions in the formulae.

[0433] In one aspect, R₁ is H or methyl in any of the nucleic acids of formulae (VIII) and (IX). In one aspect, R₁ is H. In another aspect, R₁ is methyl.

[0434] In one aspect, n is 0, 1, 2 or 3 in any of the nucleic acids of formulae (V) and (VI) or (VIII) and (IX) or (X) and (XI). Preferably, n is 0.

[0435] Examples of F moieties in any of the nucleic acids of formulae (X) and (XI) include (CH₂)₁₋₆ e.g. (CH₂)₁₋₄ e.g., CH₂, (CH₂)₄, (CH₂)₅ or (CH₂)₆, or CH₂O(CH₂)₂₋₃, e.g. CH₂O(CH₂)CH₃.

[0436] In one aspect, L₂ in formulae (X) and (XI) is:

[chemical structure]

[0437] In one aspect, L₂ is:

[chemical structure]

[0438] In one aspect, L₂ is:

[chemical structure]

[0439] In one aspect, L₂ is:

[chemical structure]

[0440] In one aspect, n is 0 and L₂ is:

[chemical structure]

and the terminal OH group is absent such that the following moiety is formed:

[chemical structure]

wherein Y is O or S.

[0441] In one aspect, L in the nucleic acids of formulae (V) and (VI) or (VIII) and (IX) or (X) and (XI), is selected from the group comprising, or preferably consisting of:
[0442] —(CH₂)ᵣC(O)—, wherein r=2-12;
[0443] —(CH₂—CH₂—O)ₛ—CH₂—C(O)—, wherein s=1-5;
[0444] —(CH₂)ᵣ—CO—NH—(CH₂)ₜ—NH—C(O)—, wherein t is independently 1-5;
[0445] —(CH₂)ᵤ—CO—NH—(CH₂)ᵤ—C(O)—, wherein u is independently 1-5; and
[0446] —(CH₂)ᵥ—NH—C(O)—, wherein v is 2-12;
[0447] wherein the terminal C(O) is attached to the NH group.

[0448] Preferably, L is —(CH₂)ᵣC(O)—, wherein r=2-12, more preferably r=2-6 even more preferably, r=4 or 6 e.g., 4.

[0449] Preferably, L is:

[chemical structure]

[0450] Within the moiety bracketed by b, c and d, L₂ in the nucleic acids of formulae (X) and (XI) is typically the same. Between moieties bracketed by b, c and d, L₂ may be the same or different. In an embodiment, L₂ in the moiety bracketed by c is the same as the L₂ in the moiety bracketed by d. In an embodiment, L₂ in the moiety bracketed by c is not the same as L₂ in the moiety bracketed by d. In an embodiment, the L₂ in the moieties bracketed by b, c and d is the same, for example when the linker moiety is a serinol-derived linker moiety.

[0451] Serinol derived linker moieties may be based on serinol in any stereochemistry i.e., derived from L-serine isomer, D-serine isomer, a racemic serine or other combination of isomers. In a preferred aspect of the invention, the serinol-GalNAc moiety (SerGN) has the following stereochemistry:

[chemical structure]

i.e., is based on an (S)-serinol-amidite or (S)-serinol succinate solid supported building block derived from L-serine isomer.

[0452] In a preferred aspect, the first strand of the nucleic acid is a compound of formula (VIII) and the second strand of the nucleic acid is a compound of formula (IX), wherein:
[0453] b is 0;
[0454] c and d are 1,
[0455] n is 0,
[0456] Z₁ and Z₂ are respectively the first and second strand of the nucleic acid,
[0457] Y is S,
[0458] R₁ is H, and
[0459] L is —(CH₂)₄—C(O)—, wherein the terminal C(O) of L is attached to the N atom of the linker (ie not a possible N atom of a targeting ligand).

[0460] In another preferred aspect, the first strand of the nucleic acid is a compound of formula (V) and the second strand of the nucleic acid is a compound of formula (VI), wherein:
[0461] b is 0,
[0462] c and d are 1,
[0463] n is 0,
[0464] Z₁ and Z₂ are respectively the first and second strand of the nucleic acid,
[0465] Y is S,
[0466] L₁ is of formula (VII), wherein:
   [0467] W₁ is —CH₂—O—(CH₂)₃—,
   [0468] W₃ is —CH₂—,
   [0469] W₅ is absent,
   [0470] V is CH,
   [0471] X is NH, and
   [0472] L is —(CH₂)₄—C(O)— wherein the terminal C(O) of L is attached to the N atom of X in formula (VII).

[0473] In another preferred aspect, the first strand of the nucleic acid is a compound of formula (V) and the second strand of the nucleic acid is a compound of formula (VI), wherein:
[0474] b is 0,
[0475] c and d are 1,
[0476] n is 0,
[0477] Z₁ and Z₂ are respectively the first and second strand of the nucleic acid,
[0478] Y is S,
[0479] L₁ is of formula (VII), wherein:
   [0480] W₁, W₃ and W₅ are absent,
   [0481] V is

[chemical structure]

[0482] X is absent, and
[0483] L is —(CH₂)₄—C(O)—NH—(CH₂)₅—C(O)—, wherein the terminal C(O) of L is attached to the N atom of V in formula (VII).

[0484] In one aspect, the nucleic acid is conjugated to a triantennary ligand with the following structure:

[chemical structure]

wherein the nucleic acid is conjugated to the triantennary ligand via the phosphate group of the ligand to the
[0485] a) 3′ position of the ribose of the terminal nucleotide of the second (sense) strand of Z (which is also referred to as strand “B” in Tables 5a, 5b, 5c), or
[0486] b) 5′ position of the ribose of the terminal nucleotide of the second (sense) strand of Z (which is also referred to as strand “B” in Tables 5a, 5b, 5c), or
[0487] c) 3′ position of the ribose of the terminal nucleotide of the first (antisense) strand of Z (which is also referred to as strand “A” in Tables 5a, 5b.

[0488] In one aspect of the nucleic acid, the cells that are targeted by the nucleic acid with a ligand are hepatocytes.

[0489] In any one of the above ligands where GalNAc is present, the GalNAc may be substituted for any other selected targeting ligand, such as, e.g., those mentioned herein, and in particular, mannose, galactose, glucose, glucosamine and fucose.

[0490] In one aspect, the nucleic acid is conjugated to a heterologous moiety that comprises a lipid, and more preferably, a cholesterol.

[0491] In one aspect, the double-stranded nucleic acid for inhibiting expression of MASP-2 is one of the duplexes shown in Table 5c, which may be referred to by their Duplex ID number.

[0492] In one preferred aspect, the double-stranded nucleic acid for inhibiting expression of MASP-2 is the duplex with Duplex ID number EM1203, EM1204, EM1205, EM1206, EM1207, EM1208, EM1209, EM1210, EM1211, EM1212 or EM1213.

[0493] In one preferred aspect the double-stranded nucleic acid for inhibiting expression of MASP-2 is a nucleic acid, wherein the first strand sequence comprises
[0494] (vp)-mU fC mG fG mA fG mC fG mG fA mA fG mG fU mA fA mU (ps) fG (ps) mU (SEQ ID No. 804) and optionally wherein the second strand sequence comprises
[0495] [ST23 (ps)]₃ ST41 (ps) mA mC mA mU mU mA fC fC fU mU mC mC mG mC mU mC mC (ps) mG (ps) mA (SEQ ID No: 805).

[0496] In one preferred aspect the double-stranded nucleic acid for inhibiting expression of MASP-2 is a nucleic acid, wherein the first strand sequence consists of
[0497] (vp)-mU fC mG fG mA fG mC fG mG fA mA fG mG fU mA fA mU (ps) fG (ps) mU (SEQ ID No. 804) and optionally wherein the second strand sequence consists of
[0498] [ST23 (ps)]₃ ST41 (ps) mA mC mA mU mU mA fC fC fU mU mC mC mG mC mU mC mC (ps) mG (ps) mA (SEQ ID No: 805).

[0499] In one preferred aspect the double-stranded nucleic acid for inhibiting expression of MASP-2 is a nucleic acid, wherein the first strand sequence comprises
[0500] (vp)-mU fA mC fG mA fA mG fU mC fG mU fA mC fU mC fG mC (ps) fA (ps) mG (SEQ ID No. 806) and optionally wherein the second strand sequence comprises
[0501] [ST23 (ps)]₃ ST41 (ps) mC mU mG mC mG mA fG fU fA mC mG mA mC mU mU mC mG (ps) mU (ps) mC (SEQ ID No: 807).

[0502] In one preferred aspect the double-stranded nucleic acid for inhibiting expression of MASP-2 is a nucleic acid, wherein the first strand sequence consists of
[0503] (vp)-mU fA mC fG mA fA mG fU mC fG mU fA mC fU mC fG mC (ps) fA (ps) mG (SEQ ID No. 806) and optionally wherein the second strand sequence consists of
[0504] [ST23 (ps)]₃ ST41 (ps) mC mU mG mC mG mA fG fU fA mC mG mA mC mU mU mC mG (ps) mU (ps) mC (SEQ ID No: 807).

[0505] In one preferred aspect the double-stranded nucleic acid for inhibiting expression of MASP-2 is a nucleic acid, wherein the first strand sequence comprises
[0506] (vp)-mU fA mA fG mG fU mA fA mU fG mU fC mC fA mG fG mC (ps) fU (ps) mG (SEQ ID No. 810) and optionally wherein the second strand sequence comprises
[0507] [ST23 (ps)]₃ ST41 (ps) mC mA mG mC mC mU fG fG fA mC mA mU mU mA mC mC mU (ps) mU (ps) mC (SEQ ID No: 811).

[0508] In one preferred aspect the double-stranded nucleic acid for inhibiting expression of MASP-2 is a nucleic acid, wherein the first strand sequence consists of
[0509] (vp)-mU fA mA fG mG fU mA fA mU fG mU fC mC fA mG fG mC (ps) fU (ps) mG (SEQ ID No. 810) and optionally wherein the second strand sequence consists of
[0510] [ST23 (ps)]₃ ST41 (ps) mC mA mG mC mC mU fG fG fA mC mA mU mU mA mC mC mU (ps) mU (ps) mC (SEQ ID No: 811).

### Compositions, Uses and Methods

[0511] The present invention also provides compositions comprising a nucleic acid of the invention. The nucleic acids and compositions may be used as therapeutic or diagnostic agents, alone or in combination with other agents. For example, one or more nucleic acid(s) of the invention can be combined with a delivery vehicle (e.g., liposomes) and/or excipients, such as carriers, diluents. Other agents such as preservatives and stabilizers can also be added. Pharmaceutically acceptable salts or solvates of any of the nucleic acids of the invention are likewise within the scope of the present invention. Methods for the delivery of nucleic acids are known in the art and within the knowledge of the person skilled in the art.

[0512] Compositions disclosed herein are particularly pharmaceutical compositions. Such compositions are suitable for administration to a subject.

[0513] In one aspect, the composition comprises a nucleic acid disclosed herein, or a pharmaceutically acceptable salt or solvate thereof, and a solvent (preferably water) and/or a delivery vehicle and/or a physiologically acceptable excipient and/or a carrier and/or a salt and/or a diluent and/or a buffer and/or a preservative.

[0514] Pharmaceutically acceptable carriers or diluents include those used in formulations suitable for oral, rectal, nasal or parenteral (including subcutaneous, intramuscular, intravenous, intradermal, and transdermal) administration. The formulations may conveniently be presented in unit dosage form and may be prepared by any of the methods well known in the art of pharmacy. Subcutaneous or transdermal modes of administration may be particularly suitable for the compounds described herein.

[0515] The prophylactically or therapeutically effective amount of a nucleic acid of the present invention will depend on the route of administration, the type of mammal being treated, and the physical characteristics of the specific mammal under consideration. These factors and their relationship to determining this amount are well known to skilled practitioners in the medical arts. This amount and the method of administration can be tailored to achieve optimal efficacy, and may depend on such factors as weight, diet, concurrent medication and other factors, well known to those skilled in the medical arts. The dosage sizes and dosing regimen most appropriate for human use may be guided by the results obtained by the present invention and may be confirmed in properly designed clinical trials.

[0516] An effective dosage and treatment protocol may be determined by conventional means, starting with a low dose in laboratory animals and then increasing the dosage while monitoring the effects, and systematically varying the dosage regimen as well. Numerous factors may be taken into consideration by a clinician when determining an optimal dosage for a given subject. Such considerations are known to the skilled person.

[0517] Nucleic acids of the present invention, or salts thereof, may be formulated as pharmaceutical compositions prepared for storage or administration, which typically comprise a prophylactically or therapeutically effective amount of a nucleic acid of the invention, or a salt thereof, in a pharmaceutically acceptable carrier.

[0518] The nucleic acid or conjugated nucleic acid of the present invention can also be administered in combination with other therapeutic compounds, either administrated separately or simultaneously, e.g., as a combined unit dose. The invention also includes a composition comprising one or more nucleic acids according to the present invention in a physiologically/pharmaceutically acceptable excipient, such as a stabilizer, preservative, diluent, buffer, and the like.

[0519] In one aspect, the composition comprises a nucleic acid disclosed herein and a further therapeutic agent selected from the group comprising an oligonucleotide, a small molecule, a monoclonal antibody, a polyclonal antibody and a peptide. Preferably, the further therapeutic agent is an agent that targets, preferably inhibits the expression or the activity, of MASP-2 or of another element, such as a protein, of the immune system or more specifically of the complement pathway. Preferably, the further therapeutic agent is one of the following: a) a peptide that inhibits the expression or activity of one of the components of the complement pathway, preferably MASP-2, C4, C2, C3, C5 or one of their subunits or proteolytic cleavage products; b) an antibody that specifically binds under physiological conditions to one of the components of the complement pathway, preferably MASP-2, C4, C2, C3, C5 or one of their subunits or proteolytic cleavage products; c) Eculizumab or an antigen-binding derivative thereof; d) Narsoplimab (OMS721) or an antigen-binding derivative.

[0520] Eculizumab is a humanised monoclonal antibody that specifically binds to the complement component C5 and is commercialised under the trade name SOLIRIS®. It specifically binds the complement component C5 with high affinity and inhibits cleavage of C5 to C5a and C5b. The antibody is for example described in the patent EP 0 758 904 B1 and its family members.

[0521] In certain embodiments, two or more nucleic acids of the invention with different sequences may be administered simultaneously or sequentially.

[0522] In another aspect, the present invention provides a composition, e.g., a pharmaceutical composition, comprising one or a combination of different nucleic acids of the invention and at least one pharmaceutically acceptable carrier.

[0523] Dosage levels for the therapeutic agents and compositions of the invention can be determined by those skilled in the art by experimentation. In one aspect, a unit dose may contain between about 0.01 mg/kg and about 100 mg/kg body weight of nucleic acid or conjugated nucleic acid. Alternatively, the dose can be from 10 mg/kg to 25 mg/kg body weight, or 1 mg/kg to 10 mg/kg body weight, or 0.05 mg/kg to 5 mg/kg body weight, or 0.1 mg/kg to 5 mg/kg body weight, or 0.1 mg/kg to 1 mg/kg body weight, or 0.1 mg/kg to 0.5 mg/kg body weight, or 0.5 mg/kg to 1 mg/kg body weight. Alternatively, the dose can be from about 0.5 mg/kg to about 10 mg/kg body weight, or about 0.6 mg/kg to about 8 mg/kg body weight, or about 0.7 mg/kg to about 7 mg/kg body weight, or about 0.8 mg/kg to about 6 mg/kg body weight, or about 0.9 mg/kg to about 5.5 mg/kg body weight, or about 1 mg/kg to about 5 mg/kg body weight, or about 1 mg/kg body weight, or about 3 mg/kg body weight, or about 5 mg/kg body weight, wherein “about” is a deviation of up to 30%, preferably up to 20%, more preferably up to 10%, yet more preferably up to 5% and most preferably 0% from the indicated value. Dosage levels may also be calculated via other parameters such as, e.g., body surface area.

[0524] A dose unit of these nucleic acids preferably comprises about 1 mg/kg to about 5 mg/kg body weight, or about 1 mg/kg to about 3 mg/kg body weight, or about 1 mg/kg body weight, or about 3 mg/kg body weight, or about 5 mg/kg body weight. The MASP-2 mRNA level in the liver and/or the MASP-2 protein level in the plasma or blood of a subject treated by a dose unit of the nucleic acid is preferably decreased at the time point of maximum effect by at least 30%, at least 40%, at least 50%, at least 60% or at least 70% as compared to a control that was not treatment with the nucleic acid or treated with a control nucleic acid under comparable conditions.

[0525] The dosage and frequency of administration may vary depending on whether the treatment is therapeutic or prophylactic (e.g., preventative), and may be adjusted during the course of treatment. In certain prophylactic applications, a relatively low dosage is administered at relatively infrequent intervals over a relatively long period of time. Some subjects may continue to receive treatment over their lifetime. In certain therapeutic applications, a relatively high dosage at relatively short intervals is sometimes required until progression of the disease is reduced or until the patient shows partial or complete amelioration of symptoms of disease. Thereafter, the patient may be switched to a suitable prophylactic dosing regimen.

[0526] Actual dosage levels of a nucleic acid of the invention alone or in combination with one or more other active ingredients in the pharmaceutical compositions of the present invention may be varied so as to obtain an amount of the active ingredient which is effective to achieve the desired therapeutic response for a particular patient, composition, and mode of administration, without causing deleterious side effects to the subject or patient. A selected dosage level will depend upon a variety of factors, such as pharmacokinetic factors, including the activity of the particular nucleic acid or composition employed, the route of administration, the time of administration, the rate of excretion of the particular nucleic acid being employed, the duration of the treatment, other drugs, compounds and/or materials used in combination with the particular compositions employed, the age, sex, weight, condition, general health and prior medical history of the subject or patient being treated, and similar factors well known in the medical arts.

[0527] The pharmaceutical composition may be a sterile injectable aqueous suspension or solution, or in a lyophilized form.

[0528] The pharmaceutical compositions can be in unit dosage form. In such form, the composition is divided into unit doses containing appropriate quantities of the active component. The unit dosage form can be a packaged preparation, the package containing discrete quantities of the preparations, for example, packeted tablets, capsules, and powders in vials or ampoules. The unit dosage form can also be a capsule, cachet, or tablet itself, or it can be the appropriate number of any of these packaged forms. It may be provided in single dose injectable form, for example in the form of a pen. Compositions may be formulated for any suitable route and means of administration.

[0529] The therapeutic agents and pharmaceutical compositions of the present invention may be administered to a mammalian subject in a pharmaceutically effective dose. The mammal may be selected from a human, a non-human primate, a simian or prosimian, a dog, a cat, a horse, cattle, a pig, a goat, a sheep, a mouse, a rat, a hamster, a hedgehog and a guinea pig, or other species of relevance. On this basis, “MASP-2” as used herein denotes nucleic acid or protein in any of the above-mentioned species, if expressed therein naturally or artificially, but preferably this wording denotes human nucleic acids or proteins.

[0530] Pharmaceutical compositions of the invention may be administered alone or in combination with one or more other therapeutic or diagnostic agents. A combination therapy may include a nucleic acid of the present invention combined with at least one other therapeutic agent selected based on the particular patient, disease or condition to be treated. Examples of other such agents include, inter alia, a therapeutically active small molecule or polypeptide, a single chain antibody, a classical antibody or fragment thereof, or a nucleic acid molecule which modulates gene expression of one or more additional genes, and similar modulating therapeutics which may complement or otherwise be beneficial in a therapeutic or prophylactic treatment regimen.

[0531] Pharmaceutical compositions are typically sterile and stable under the conditions of manufacture and storage. The composition may be formulated as a solution, microemulsion, liposome, or other ordered structure suitable to high drug concentration. The carrier may be a solvent or dispersion medium containing, for example, water, alcohol such as ethanol, polyol (e.g., glycerol, propylene glycol, and liquid polyethylene glycol), or any suitable mixtures. The proper fluidity may be maintained, for example, by the use of a coating such as lecithin, by the maintenance of the required particle size in the case of dispersion and by use of surfactants according to formulation chemistry well known in the art. In certain embodiments, isotonic agents, e.g., sugars, polyalcohols such as mannitol, sorbitol, or sodium chloride may be desirable in the composition. Prolonged absorption of injectable compositions may be brought about by including in the composition an agent that delays absorption for example, monostearate salts and gelatine.

[0532] One aspect of the invention is a nucleic acid, or a composition disclosed herein for use as a therapeutic agent. The nucleic acid or composition is preferably for use in the prophylaxis or treatment of a disease, disorder or syndrome.

[0533] The present invention provides a nucleic acid for use, alone or in combination with one or more additional therapeutic agents in a pharmaceutical composition, for treatment or prophylaxis of conditions, diseases and disorders responsive to inhibition of MASP-2 expression.

[0534] One aspect of the invention is the use of a nucleic acid, or a composition as disclosed herein in the prophylaxis or treatment of a disease, disorder or syndrome.

[0535] Nucleic acids and pharmaceutical compositions of the invention may be used in the treatment of a variety of conditions, disorders or diseases. Treatment with a nucleic acid of the invention preferably leads to in vivo MASP-2 depletion, preferably in the liver and/or in blood. As such, nucleic acids of the invention, and compositions comprising them, will be useful in methods for treating a variety of pathological disorders in which inhibiting the expression of MASP-2 may be beneficial. The present invention provides methods for treating a disease, disorder or syndrome comprising the step of administering to a subject in need thereof a prophylactically or therapeutically effective amount of a nucleic acid of the invention.

[0536] The invention thus provides methods of prophylaxis or treatment of a disease, disorder or syndrome, the method comprising the step of administering to a subject (e.g., a patient) in need thereof a therapeutically effective amount of a nucleic acid or pharmaceutical composition comprising a nucleic acid of the invention.

[0537] The most desirable therapeutically effective amount is an amount that will produce a desired efficacy of a particular treatment selected by one of skill in the art for a given subject in need thereof. This amount will vary depending upon a variety of factors understood by the skilled worker, including but not limited to the characteristics of the therapeutic compound (including activity, pharmacokinetics, pharmacodynamics, and bioavailability), the physiological condition of the subject (including age, sex, disease type and stage, general physical condition, responsiveness to a given dosage, and type of medication), the nature of the pharmaceutically acceptable carrier or carriers in the formulation, and the route of administration. One skilled in the clinical and pharmacological arts will be able to determine a therapeutically effective amount through experimentation, namely by monitoring a subject's response to administration of a compound and adjusting the dosage accordingly. See, e.g., Remington: The Science and Practice of Pharmacy 21st Ed., Univ. of Sciences in Philadelphia (USIP), Lippincott Williams & Wilkins, Philadelphia, PA, 2005.

[0538] In certain embodiments, nucleic acids and pharmaceutical compositions of the invention may be used to treat or prevent a disease, disorder or syndrome.

[0539] In certain embodiments, the present invention provides methods for prophylaxis or treatment of a disease, disorder or syndrome in a mammalian subject, such as a human, the method comprising the step of administering to a subject in need thereof a prophylactically or therapeutically effective amount of a nucleic acid as disclosed herein.

[0540] Administration of a “therapeutically effective dosage” of a nucleic acid of the invention may result in a decrease in severity of disease symptoms, an increase in frequency and duration of disease symptom-free periods, or a prevention of impairment or disability due to the disease affliction.

[0541] Nucleic acids of the invention may be beneficial in treating or diagnosing a disease, disorder or syndrome that may be diagnosed or treated using the methods described herein. Treatment and diagnosis of other diseases, disorders or syndromes are also considered to fall within the scope of the present invention.

[0542] One aspect of the invention is a method of prophylaxis or treatment of a disease, disorder or syndrome comprising administering a pharmaceutically effective dose or amount a nucleic acid or a composition disclosed herein to an individual in need of treatment, preferably wherein the nucleic acid or composition is administered to the subject subcutaneously, intravenously or by oral, rectal, pulmonary, intramuscular or intraperitoneal administration. Preferably, it is administered subcutaneously.

[0543] The relevant disease, disorder or syndrome is preferably a complement-mediated disease, disorder or syndrome or a disease disorder or syndrome associated with the complement pathway, and particularly the Alternative complement pathway.

[0544] The disease, disorder or syndrome is typically associated with aberrant activation and/or over-activation (hyper-activation) of the complement pathway (particularly the Lectin pathway) and/or with over-expression or ectopic expression or localisation or accumulation of MASP-2. One example of a disease that involves accumulation of MASP-2 is IgA nephropathy where Lectin pathway contributes to activation and deposition of C3 and C4 and induction of renal damage. The aberrant or over activation of the complement pathway may have genetic causes or may be acquired.

[0545] The disease, disorder or syndrome may be a) selected from the group comprising, and preferably consisting of C3 glomerulopathy (C3G), paroxysmal nocturnal hemoglobinuria (PNH), atypical hemolytic uremic syndrome (aHUS), lupus nephritis, IgA nephropathy (IgA N), cold agglutinin disease (CAD), myasthenia gravis (MG), primary membranous nephropathy, immune complex-mediated glomerulonephritis (IC-mediated GN), post-infectious glomerulonephritis (PIGN), systemic lupus erythematosus (SLE), ischemia/reperfusion injury, age-related macular degeneration (AMD), rheumatoid arthritis (RA), antineutrophil cytoplasmic autoantibodies-associated vasculitis (ANCA-AV), dysbiotic periodontal disease, malarial anaemia, neuromyelitis optica, post-HCT/solid organ transplant (TMAs), Guillain-Barré syndrome, membranous glomerulonephritis, thrombotic thrombocytopenic purpura and sepsis; or b) selected from the group comprising, or preferably consisting of C3 glomerulopathy (C3G), paroxysmal nocturnal hemoglobinuria (PNH), atypical hemolytic uremic syndrome (aHUS), lupus nephritis, IgA nephropathy (IgA N) and primary membranous nephropathy; or c) selected from the group comprising, or preferably consisting of C3 glomerulopathy (C3G), antineutrophil cytoplasmic autoantibodies-associated vasculitis (ANCA-AV), atypical hemolytic uremic syndrome (aHUS), cold agglutinin disease (CAD), myasthenia gravis (MG), IgA nephropathy (IgA N), paroxysmal nocturnal hemoglobinuria (PNH); d) selected from the group comprising, or preferably consisting of C3 glomerulopathy (C3G), cold agglutinin disease (CAD), myasthenia gravis (MG), neuromyelitis optica, atypical hemolytic uremic syndrome (aHUS), antineutrophil cytoplasmic autoantibodies-associated vasculitis (ANCA-AV), IgA nephropathy (IgA N), post-HCT/solid organ transplant (TMAs), Guillain-Barré syndrome, paroxysmal nocturnal hemoglobinuria (PNH), membranous glomerulonephritis, lupus nephritis and thrombotic thrombocytopenic purpura; e) C3 glomerulopathy (C3G), cold agglutinin disease (CAD) and IgA nephropathy (IgA N) or f) it is C3 glomerulopathy (C3G). The subjects to be treated with a nucleic acid or composition according to the invention are preferably subjects that are affected by or are at risk of being affected by one of these diseases, disorders or syndromes.

[0546] A nucleic acid or compositions disclosed herein may be for use in a regimen comprising treatments once or twice weekly, every week, every two weeks, every three weeks, every four weeks, every five weeks, every six weeks, every seven weeks, every eight weeks, every nine weeks, every ten weeks, every eleven weeks, every twelve weeks, every three months, every four months, every five months, every six months or in regimens with varying dosing frequency such as combinations of the before-mentioned intervals. The nucleic acid or composition may be for use subcutaneously, intravenously or using any other application routes such as oral, rectal, pulmonary, or intraperitoneal. Preferably, it is for use subcutaneously.

[0547] In cells and/or subjects treated with or receiving a nucleic acid or composition as disclosed herein, the MASP-2 expression may be inhibited compared to untreated cells and/or subjects by a range from 15% up to 100% but at least about 30%, 35%, 40%, 45%, 50%, 55%, 60%, 65%, 70%, 75%, 80%, 85%, 90%, 95%, 98%, or 100% or intermediate values. The level of inhibition may allow treatment of a disease associated with MASP-2 expression or overexpression or complement over-activation, or may serve to further investigate the functions and physiological roles of the MASP-2 gene products. The level of inhibition is preferably measured in the liver or in the blood or in the kidneys, preferably in the blood, of the subject treated with the nucleic acid or composition.

[0548] One aspect is the use of a nucleic acid or composition as disclosed herein in the manufacture of a medicament for treating a disease, disorder or syndromes, such as those as listed above or additional pathologies associated with elevated levels of MASP-2, preferably in the blood or in the kidneys, or over activation of the complement pathway, or additional therapeutic approaches where inhibition of MASP-2 expression is desired. A medicament is a pharmaceutical composition.

[0549] Each of the nucleic acids of the invention and pharmaceutically acceptable salts and solvates thereof constitutes an individual embodiment of the invention.

[0550] Also included in the invention is a method of prophylaxis or treatment of a disease, disorder or syndrome, such as those listed above, comprising administration of a composition comprising a nucleic acid or composition as described herein, to an individual in need thereof. The nucleic acid or composition may, for example, be administered in a regimen comprising treatments twice every week, once every week, every two weeks, every three weeks, every four weeks, every five weeks, every six weeks, every seven weeks, or every eight to twelve or more weeks or in regimens with varying dosing frequency such as combinations of the before-mentioned intervals. The nucleic acid or conjugated nucleic acid may be for use subcutaneously or intravenously or other application routes such as oral, rectal or intraperitoneal.

[0551] A nucleic acid of the invention may be administered by any appropriate administration pathway known in the art, including but not limited to aerosol, enteral, nasal, ophthalmic, oral, parenteral, rectal, vaginal, or transdermal (e.g., topical administration of a cream, gel or ointment, or by means of a transdermal patch). “Parenteral administration” is typically associated with injection at or in communication with the intended site of action, including infraorbital, infusion, intraarterial, intracapsular, intracardiac, intradermal, intramuscular, intraperitoneal, intrapulmonary, intraspinal, intrasternal, intrathecal, intrauterine, intravenous, subarachnoid, subcapsular, subcutaneous, transmucosal, or transtracheal administration.

[0552] The use of a chemical modification pattern of the nucleic acids confers nuclease stability in serum and makes for example subcutaneous application route feasible.

[0553] Solutions or suspensions used for intradermal or subcutaneous application typically include one or more of: a sterile diluent such as water for injection, saline solution, fixed oils, polyethylene glycols, glycerine, propylene glycol or other synthetic solvents; antibacterial agents such as benzyl alcohol or methyl parabens; antioxidants such as ascorbic acid or sodium bisulfite; chelating agents such as ethylenediaminetetraacetic acid; buffers such as acetates, citrates or phosphates; and/or tonicity adjusting agents such as, e.g., sodium chloride or dextrose. The pH can be adjusted with acids or bases, such as hydrochloric acid or sodium hydroxide, or buffers with citrate, phosphate, acetate and the like. Such preparations may be enclosed in ampoules, disposable syringes or multiple dose vials made of glass or plastic.

[0554] Sterile injectable solutions may be prepared by incorporating a nucleic acid in the required amount in an appropriate solvent with one or a combination of ingredients described above, as required, followed by sterilization microfiltration. Dispersions may be prepared by incorporating the active compound into a sterile vehicle that contains a dispersion medium and optionally other ingredients, such as those described above. In the case of sterile powders for the preparation of sterile injectable solutions, the methods of preparation are vacuum drying and freeze-drying (lyophilization) that yield a powder of the active ingredient in addition to any additional desired ingredient from a sterile-filtered solution thereof.

[0555] When a prophylactically or therapeutically effective amount of a nucleic acid of the invention is administered by, e.g., intravenous, cutaneous or subcutaneous injection, the nucleic acid will be in the form of a pyrogen-free, parenterally acceptable aqueous solution. Methods for preparing parenterally acceptable solutions, taking into consideration appropriate pH, isotonicity, stability, and the like, are within the skill in the art. A preferred pharmaceutical composition for intravenous, cutaneous, or subcutaneous injection will contain, in addition to a nucleic acid, an isotonic vehicle such as sodium chloride injection, Ringer's injection, dextrose injection, dextrose and sodium chloride injection, lactated Ringer's injection, or other vehicle as known in the art. A pharmaceutical composition of the present invention may also contain stabilizers, preservatives, buffers, antioxidants, or other additives well known to those of skill in the art.

[0556] The amount of nucleic acid which can be combined with a carrier material to produce a single dosage form will vary depending on a variety of factors, including the subject being treated, and the particular mode of administration. In general, it will be an amount of the composition that produces an appropriate therapeutic effect under the particular circumstances. Generally, out of one hundred percent, this amount will range from about 0.01% to about 99% of nucleic acid, from about 0.1% to about 70%, or from about 1% to about 30% of nucleic acid in combination with a pharmaceutically acceptable carrier.

[0557] The nucleic acid may be prepared with carriers that will protect the compound against rapid release, such as a controlled release formulation, including implants, transdermal patches, and microencapsulated delivery systems. Biodegradable, biocompatible polymers can be used, such as ethylene vinyl acetate, polyanhydrides, polyglycolic acid, collagen, polyorthoesters, and polylactic acid. Many methods for the preparation of such formulations are patented or generally known to those skilled in the art. See, e.g., Sustained and Controlled Release Drug Delivery Systems, J. R. Robinson, ed., Marcel Dekker, Inc., New York, 1978.

[0558] Dosage regimens may be adjusted to provide the optimum desired response (e.g., a therapeutic response). For example, a dose may be administered, several divided doses may be administered overtime, or the dose may be proportionally reduced or increased as indicated by the particular circumstances of the therapeutic situation, on a case-by-case basis. It is especially advantageous to formulate parenteral compositions in dosage unit forms for ease of administration and uniformity of dosage when administered to the subject or patient. As used herein, a dosage unit form refers to physically discrete units suitable as unitary dosages for the subjects to be treated; each unit containing a predetermined quantity of active compound calculated to produce a desired therapeutic effect. The specification for the dosage unit forms of the invention depends on the specific characteristics of the active compound and the particular therapeutic or prophylactic effect(s) to be achieved and the treatment and sensitivity of any individual patient.

[0559] The nucleic acid or composition of the present invention can be produced using routine methods in the art including chemical synthesis, such as solid phase chemical synthesis.

[0560] Nucleic acids or compositions of the invention may be administered with one or more of a variety of medical devices known in the art. For example, in one embodiment, a nucleic acid of the invention may be administered with a needleless hypodermic injection device. Examples of well-known implants and modules useful in the present invention are in the art, including e.g., implantable micro-infusion pumps for controlled rate delivery; devices for administering through the skin; infusion pumps for delivery at a precise infusion rate; variable flow implantable infusion devices for continuous drug delivery; and osmotic drug delivery systems. These and other such implants, delivery systems, and modules are known to those skilled in the art.

[0561] In certain embodiments, the nucleic acid or composition of the invention may be formulated to ensure a desired distribution in vivo. To target a therapeutic compound or composition of the invention to a particular in vivo location, they can be formulated, for example, in liposomes which may comprise one or more moieties that are selectively transported into specific cells or organs, thus enhancing targeted drug delivery.

[0562] The invention is characterized by high specificity at the molecular and tissue-directed delivery level. The sequences of the nucleic acids of the invention are highly specific for their target, meaning that they do not inhibit the expression of genes that they are not designed to target or only minimally inhibit the expression of genes that they are not designed to target and/or only inhibit the expression of a low number of genes that they are not designed to target. A further level of specificity is achieved when nucleic acids are linked to a ligand that is specifically recognised and internalised by a particular cell type. This is for example the case when a nucleic acid is linked to a ligand comprising GalNAc moieties, which are specifically recognised and internalised by hepatocytes. This leads to the nucleic acid inhibiting the expression of their target only in the cells that are targeted by the ligand to which they are linked. These two levels of specificity potentially confer a better safety profile than the currently available treatments. In certain embodiments, the present invention thus provides nucleic acids of the invention linked to a ligand comprising one or more GalNAc moieties, or comprising one or more other moieties that confer cell-type or tissue-specific internalisation of the nucleic acid thereby conferring additional specificity of target gene knockdown by RNA interference.

[0563] The nucleic acid as described herein may be formulated with a lipid in the form of a liposome. Such a formulation may be described in the art as a lipoplex. The composition with a lipid/liposome may be used to assist with delivery of the nucleic acid of the invention to the target cells. The lipid delivery system herein described may be used as an alternative to a conjugated ligand. The modifications herein described may be present when using the nucleic acid of the invention with a lipid delivery system or with a ligand conjugate delivery system.

[0564] Such a lipoplex may comprise a lipid composition comprising:
[0565] i) a cationic lipid, or a pharmaceutically acceptable salt thereof;
[0566] ii) a steroid;
[0567] iii) a phosphatidylethanolamine phospholipid; and/or
[0568] iv) a PEGylated lipid.

[0569] The cationic lipid may be an amino cationic lipid.

[0570] The cationic lipid may have the formula (XII):

[chemical structure]

or a pharmaceutically acceptable salt thereof, wherein:
[0571] X represents O, S or NH;
[0572] R¹ and R² each independently represents a C₄-C₂₂ linear or branched alkyl chain or a C₄-C₂₂ linear or branched alkenyl chain with one or more double bonds, wherein the alkyl or alkenyl chain optionally contains an intervening ester, amide or disulfide;
[0573] when X represents S or NH, R³ and R⁴ each independently represent hydrogen, methyl, ethyl, a mono- or polyamine moiety, or R³ and R⁴ together form a heterocyclyl ring;
[0574] when X represents O, R3 and R4 each independently represent hydrogen, methyl, ethyl, a mono- or polyamine moiety, or R3 and R4 together form a heterocyclyl ring, or R³ represents hydrogen and R⁴ represents C(NH)(NH₂).

[0575] The cationic lipid may have the formula (XIII):

[chemical structure]

or a pharmaceutically acceptable salt thereof.

[0576] The cationic lipid may have the formula (XIV):

[chemical structure]

or a pharmaceutically acceptable salt thereof.

[0577] The content of the cationic lipid component may be from about 55 mol % to about 65 mol % of the overall lipid content of the composition. In particular, the cationic lipid component is about 59 mol % of the overall lipid content of the composition.

[0578] The compositions can further comprise a steroid. The steroid may be cholesterol. The content of the steroid may be from about 26 mol % to about 35 mol % of the overall lipid content of the lipid composition. More particularly, the content of steroid may be about 30 mol % of the overall lipid content of the lipid composition.

[0579] The phosphatidylethanolamine phospholipid may be selected from the group consisting of 1,2-diphytanoyl-sn-glycero-3-phosphoethanolamine (DPhyPE), 1,2-dioleoyl-sn-glycero-3-phosphoethanolamine (DOPE), 1,2-distearoyl-sn-glycero-3-phosphoethanolamine (DSPE), 1,2-Dilauroyl-sn-glycero-3-phosphoethanolamine (DLPE), 1,2-Dimyristoyl-sn-glycero-3-phosphoethanolamine (DMPE), 1,2-Dipalmitoyl-sn-glycero-3-phosphoethanolamine (DPPE), 1,2-Dilinoleoyl-sn-glycero-3-phosphoethanolamine (DLoPE), 1-Palmitoyl-2-oleoyl-sn-glycero-3-phosphoethanolamine (POPE), 1,2-Dierucoyl-sn-glycero-3-phosphoethanolamine (DEPE), 1,2-Disqualeoyl-sn-glycero-3-phosphoethanolamine (DSQPE) and 1-Stearoyl-2-linoleoyl-sn-glycero-3-phosphoethanolamine (SLPE). The content of the phospholipid may be about 10 mol % of the overall lipid content of the composition.

[0580] The PEGylated lipid may be selected from the group consisting of 1,2-dimyristoyl-sn-glycerol, methoxypolyethylene glycol (DMG-PEG) and C16-Ceramide-PEG. The content of the PEGylated lipid may be about 1 to 5 mol % of the overall lipid content of the composition.

[0581] The content of the cationic lipid component in the composition may be from about 55 mol % to about 65 mol % of the overall lipid content of the lipid composition, preferably about 59 mol % of the overall lipid content of the lipid composition.

[0582] The composition may have a molar ratio of the components of i):ii):iii):iv) selected from 55:34:10:1; 56:33:10:1; 57:32:10:1; 58:31:10:1; 59:30:10:1; 60:29:10:1; 61:28:10:1; 62:27:10:1; 63:26:10:1; 64:25:10:1; and 65:24:10:1.

[0583] The composition may comprise a cationic lipid having the structure

[chemical structure]

a steroid having the structure

[chemical structure]

a phosphatidylethanolamine phospholipid having the structure

[chemical structure]

and a PEGylated lipid having the structure

[chemical structure]

[0584] Neutral liposome compositions may be formed from, for example, dimyristoyl phosphatidylcholine (DMPC) or dipalmitoyl phosphatidylcholine (DPPC). Anionic liposome compositions may be formed from dimyristoyl phosphatidylglycerol, while anionic fusogenic liposomes may be formed primarily from dioleoyl phosphatidylethanolamine (DOPE). Another type of liposomal composition may be formed from phosphatidylcholine (PC) such as, for example, soybean PC, and egg PC. Another type is formed from mixtures of phospholipid and/or phosphatidylcholine and/or cholesterol.

[0585] A positively charged synthetic cationic lipid, N-[1-(2,3-dioleyloxy)propyl]-N,N,N-trimethylammonium chloride (DOTMA) can be used to form small liposomes that interact spontaneously with nucleic acid to form lipid-nucleic acid complexes which are capable of fusing with the negatively charged lipids of the cell membranes of tissue culture cells. DOTMA analogues can also be used to form liposomes.

[0586] Derivatives and analogues of lipids described herein may also be used to form liposomes.

[0587] A liposome containing a nucleic acid can be prepared by a variety of methods. In one example, the lipid component of a liposome is dissolved in a detergent so that micelles are formed with the lipid component. For example, the lipid component can be an amphipathic cationic lipid or lipid conjugate. The detergent can have a high critical micelle concentration and may be nonionic. Exemplary detergents include cholate, CHAPS, octylglucoside, deoxycholate, and lauroyl sarcosine. The nucleic acid preparation is then added to the micelles that include the lipid component. The cationic groups on the lipid interact with the nucleic acid and condense around the nucleic acid to form a liposome. After condensation, the detergent is removed, e.g., by dialysis, to yield a liposomal preparation of nucleic acid.

[0588] If necessary, a carrier compound that assists in condensation can be added during the condensation reaction, e.g., by controlled addition. For example, the carrier compound can be a polymer other than a nucleic acid (e.g., spermine or spermidine). pH can also be adjusted to favour condensation.

[0589] Nucleic acid formulations of the present invention may include a surfactant. In one embodiment, the nucleic acid is formulated as an emulsion that includes a surfactant.

[0590] A surfactant that is not ionized is a non-ionic surfactant. Examples include non-ionic esters, such as ethylene glycol esters, propylene glycol esters, glyceryl esters etc., nonionic alkanolamides, and ethers such as fatty alcohol ethoxylates, propoxylated alcohols, and ethoxylated/propoxylated block polymers.

[0591] A surfactant that carries a negative charge when dissolved or dispersed in water is an anionic surfactant. Examples include carboxylates, such as soaps, acyl lactylates, acyl amides of amino acids, esters of sulfuric acid such as alkyl sulfates and ethoxylated alkyl sulfates, sulfonates such as alkyl benzene sulfonates, acyl isethionates, acyl taurates and sulfosuccinates, and phosphates.

[0592] A surfactant that carries a positive charge when dissolved or dispersed in water is a cationic surfactant. Examples include quaternary ammonium salts and ethoxylated amines.

[0593] A surfactant that has the ability to carry either a positive or negative charge is an amphoteric surfactant. Examples include acrylic acid derivatives, substituted alkylamides, N-alkylbetaines and phosphatides.

[0594] “Micelles” are defined herein as a particular type of molecular assembly in which amphipathic molecules are arranged in a spherical structure such that all the hydrophobic portions of the molecules are directed inward, leaving the hydrophilic portions in contact with the surrounding aqueous phase. The converse arrangement exists if the environment is hydrophobic. A micelle may be formed by mixing an aqueous solution of the nucleic acid, an alkali metal alkyl sulphate, and at least one micelle forming compound.

[0595] Exemplary micelle forming compounds include lecithin, hyaluronic acid, pharmaceutically acceptable salts of hyaluronic acid, glycolic acid, lactic acid, chamomile extract, cucumber extract, oleic acid, linoleic acid, linolenic acid, monoolein, monooleates, monolaurates, borage oil, evening of primrose oil, menthol, trihydroxy oxo cholanyl glycine and pharmaceutically acceptable salts thereof, glycerol, polyglycerol, lysine, polylysine, triolein, polyoxyethylene ethers and analogues thereof, polidocanol alkyl ethers and analogues thereof, chenodeoxycholate, deoxycholate, and mixtures thereof.

[0596] Phenol and/or m-cresol may be added to the mixed micellar composition to act as a stabiliser and preservative. An isotonic agent such as glycerine may as be added.

[0597] A nucleic acid preparation may be incorporated into a particle such as a microparticle. Microparticles can be produced by spray-drying, lyophilisation, evaporation, fluid bed drying, vacuum drying, or a combination of these methods.

### Definitions

[0598] As used herein, the terms “inhibit”, “down-regulate”, or “reduce” with respect to gene expression mean that the expression of the gene, or the level of RNA molecules or equivalent RNA molecules encoding one or more proteins or protein subunits (e.g., mRNA), or the activity of one or more proteins or protein subunits, is reduced below that observed either in the absence of the nucleic acid or conjugated nucleic acid of the invention or as compared to that obtained with an siRNA molecule with no known homology to the human transcript (herein termed non-silencing control). Such control may be conjugated and modified in an analogous manner to the molecule of the invention and delivered into the target cell by the same route. The expression after treatment with the nucleic acid of the invention may be reduced to 95%, 90%, 80%, 70%, 60%, 50%, 40%, 30%, 20%, 15%, 10%, 5% or 0% or to intermediate values, or less than that observed in the absence of the nucleic acid or conjugated nucleic acid. The expression may be measured in the cells to which the nucleic acid is applied. Alternatively, especially if the nucleic acid is administered to a subject, the level can be measured in a different group of cells or in a tissue or an organ or in a body fluid such as blood or plasma. The level of inhibition is preferably measured in conditions that have been selected because they show the greatest effect of the nucleic acid on the target mRNA level in cells treated with the nucleic acid in vitro. The level of inhibition may for example be measured after 24 hours or 48 hours of treatment with a nucleic acid at a concentration of between 0.038 nM-10 μM, preferably 0.5 nM, 1 nM, 10 nM or 100 nM. These conditions may be different for different nucleic acid sequences or for different types of nucleic acids, such as for nucleic acids that are unmodified or modified or conjugated to a ligand or not. Examples of suitable conditions for determining levels of inhibition are described in the examples.

[0599] By nucleic acid it is meant a nucleic acid comprising two strands comprising nucleotides, that is able to interfere with gene expression. Inhibition may be complete or partial and results in down regulation of gene expression in a targeted manner. The nucleic acid comprises two separate polynucleotide strands; the first strand, which may also be a guide strand; and a second strand, which may also be a passenger strand. The first strand and the second strand may be part of the same polynucleotide molecule that is self-complementary which ‘folds’ back to form a double-stranded molecule. The nucleic acid may be an siRNA molecule.

[0600] The nucleic acid may comprise ribonucleotides, modified ribonucleotides, deoxynucleotides, deoxyribonucleotides, or nucleotide analogues non-nucleotides that are able to mimic nucleotides such that they may ‘pair’ with the corresponding base on the target sequence or complementary strand. The nucleic acid may further comprise a double-stranded nucleic acid portion or duplex region formed by all or a portion of the first strand (also known in the art as a guide strand) and all or a portion of the second strand (also known in the art as a passenger strand). The duplex region is defined as beginning with the first base pair formed between the first strand and the second strand and ending with the last base pair formed between the first strand and the second strand, inclusive.

[0601] By duplex region it is meant the region in two complementary or substantially complementary oligonucleotides that form base pairs with one another, either by Watson-Crick base pairing or any other manner that allows for a duplex between oligonucleotide strands that are complementary or substantially complementary. For example, an oligonucleotide strand having 21 nucleotide units can base pair with another oligonucleotide of 21 nucleotide units, yet only 19 nucleotides on each strand are complementary or substantially complementary, such that the “duplex region” consists of 19 base pairs. The remaining base pairs may exist as 5′ and 3′ overhangs, or as single-stranded regions. Further, within the duplex region, 100% complementarity is not required; substantial complementarity is allowable within a duplex region. Substantial complementarity refers to complementarity between the strands such that they are capable of annealing under biological conditions. Techniques to empirically determine if two strands are capable of annealing under biological conditions are well known in the art.

[0602] Alternatively, two strands can be synthesised and added together under biological conditions to determine if they anneal to one another. The portion of the first strand and second strand that forms at least one duplex region may be fully complementary and is at least partially complementary to each other. Depending on the length of a nucleic acid, a perfect match in terms of base complementarity between the first strand and the second strand is not necessarily required. However, the first and second strands must be able to hybridise under physiological conditions.

[0603] As used herein, the terms “non-pairing nucleotide analogue” means a nucleotide analogue which includes a non-base pairing moiety including but not limited to: 6 des amino adenosine (Nebularine), 4-Me-indole, 3-nitropyrrole, 5-nitroindole, Ds, Pa, N3-Me ribo U, N3-Me riboT, N3-Me dC, N3-Me-dT, N1-Me-dG, N1-Me-dA, N3-ethyl-dC, and N3-Me dC. In some embodiments the non-base pairing nucleotide analogue is a ribonucleotide. In other embodiments it is a deoxyribonucleotide.

[0604] As used herein, the term, “terminal functional group” includes without limitation a halogen, alcohol, amine, carboxylic, ester, amide, aldehyde, ketone, and ether groups.

[0605] An “overhang” as used herein has its normal and customary meaning in the art, i.e., a single-stranded portion of a nucleic acid that extends beyond the terminal nucleotide of a complementary strand in a double-strand nucleic acid. The term “blunt end” includes double-stranded nucleic acid whereby both strands terminate at the same position, regardless of whether the terminal nucleotide(s) are base-paired. The terminal nucleotide of a first strand and a second strand at a blunt end may be base paired. The terminal nucleotide of a first strand and a second strand at a blunt end may not be paired. The terminal two nucleotides of a first strand and a second strand at a blunt end may be base-paired. The terminal two nucleotides of a first strand and a second strand at a blunt end may not be paired.

[0606] The term “serinol-derived linker moiety” means the linker moiety comprises the following structure:

[chemical structure]

[0607] An O atom of said structure typically links to an RNA strand and the N atom typically links to the targeting ligand.

[0608] The terms “patient,” “subject,” and “individual” may be used interchangeably and refer to either a human or a non-human animal. These terms include mammals such as humans, primates, livestock animals (e.g., bovines, porcines), companion animals (e.g., canines, felines) and rodents (e.g., mice and rats).

[0609] As used herein, “treating” or “treatment” and grammatical variants thereof refer to an approach for obtaining beneficial or desired clinical results. The term may refer to slowing the onset or rate of development of a condition, disorder or disease, reducing or alleviating symptoms associated with it, generating a complete or partial regression of the condition, or some combination of any of the above. For the purposes of this invention, beneficial or desired clinical results include, but are not limited to, reduction or alleviation of symptoms, diminishment of extent of disease, stabilization (i.e., not worsening) of state of disease, delay or slowing of disease progression, amelioration or palliation of the disease state, and remission (whether partial or total), whether detectable or undetectable. “Treatment” can also mean prolonging survival relative to expected survival time if not receiving treatment. A subject (e.g., a human) in need of treatment may thus be a subject already afflicted with the disease or disorder in question. The term “treatment” includes inhibition or reduction of an increase in severity of a pathological state or symptoms relative to the absence of treatment, and is not necessarily meant to imply complete cessation of the relevant disease, disorder or condition.

[0610] As used herein, the terms “prophylaxis” and grammatical variants thereof refer to an approach for inhibiting or preventing the development, progression, or time or rate of onset of a condition, disease or disorder, and may relate to pathology and/or symptoms. For the purposes of this invention, beneficial or desired clinical results include, but are not limited to, prevention, inhibition or slowing of symptoms, progression or development of a disease, whether detectable or undetectable. A subject (e.g., a human) in need of prophylaxis may thus be a subject not yet afflicted with the disease or disorder in question. The term “prophylaxis” includes slowing the onset of disease relative to the absence of treatment, and is not necessarily meant to imply permanent prevention of the relevant disease, disorder or condition. Thus “prophylaxis” of a condition may in certain contexts refer to reducing the risk of developing the condition, or preventing, inhibiting or delaying the development of symptoms associated with the condition. It will be understood that prophylaxis may be considered as treatment or therapy.

[0611] As used herein, an “effective amount,” “prophylactically effective amount”, “therapeutically effective amount” or “effective dose” is an amount of a composition (e.g., a therapeutic composition or agent) that produces at least one desired therapeutic effect in a subject, such as preventing or treating a target condition or beneficially alleviating a symptom associated with the condition.

[0612] As used herein, the term “pharmaceutically acceptable salt” refers to a salt that is not harmful to a patient or subject to which the salt in question is administered. It may be a salt chosen, e.g., among acid addition salts and basic salts. Examples of acid addition salts include chloride salts, citrate salts and acetate salts. Examples of basic salts include salts wherein the cation is selected from alkali metal cations, such as sodium or potassium ions, alkaline earth metal cations, such as calcium or magnesium ions, as well as substituted ammonium ions, such as ions of the type N(R¹)(R²)(R³)(R⁴)+, wherein R¹, R², R³ and R⁴ independently will typically designate hydrogen, optionally substituted C1-6-alkyl groups or optionally substituted C2-6-alkenyl groups. Examples of relevant C1-6-alkyl groups include methyl, ethyl, 1-propyl and 2-propyl groups. Examples of C2-6-alkenyl groups of possible relevance include ethenyl, 1-propenyl and 2-propenyl. Other examples of pharmaceutically acceptable salts are described in “Remington's Pharmaceutical Sciences”, 17th edition, Alfonso R. Gennaro (Ed.), Mark Publishing Company, Easton, PA, USA, 1985 (and more recent editions thereof), in the “Encyclopaedia of Pharmaceutical Technology”, 3rd edition, James Swarbrick (Ed.), Informa Healthcare USA (Inc.), NY, USA, 2007, and in J. Pharm. Sci. 66: 2 (1977). A “pharmaceutically acceptable salt” retains qualitatively a desired biological activity of the parent compound without imparting any undesired effects relative to the compound. Examples of pharmaceutically acceptable salts include acid addition salts and base addition salts. Acid addition salts include salts derived from nontoxic inorganic acids, such as hydrochloric, nitric, phosphorous, phosphoric, sulfuric, hydrobromic, hydroiodic and the like, or from nontoxic organic acids such as aliphatic mono- and di-carboxylic acids, phenyl-substituted alkanoic acids, hydroxy alkanoic acids, aromatic acids, aliphatic and aromatic sulfonic acids and the like. Base addition salts include salts derived from alkaline earth metals, such as sodium, potassium, magnesium, calcium and the like, as well as from nontoxic organic amines, such as N, N′-dibenzylethylenediamine, N-methylglucamine, chloroprocaine, choline, diethanolamine, ethylenediamine, procaine and the like.

[0613] The term “pharmaceutically acceptable carrier” includes any of the standard pharmaceutical carriers. Pharmaceutically acceptable carriers for therapeutic use are well known in the pharmaceutical art, and are described, for example, in Remington's Pharmaceutical Sciences, Mack Publishing Co. (A. R. Gennaro edit. 1985). For example, sterile saline and phosphate-buffered saline at slightly acidic or physiological pH may be used. Exemplary pH buffering agents include phosphate, citrate, acetate, tris/hydroxymethyl)aminomethane (TRIS), N-Tris(hydroxymethyl)methyl-3-aminopropanesulphonic acid (TAPS), ammonium bicarbonate, diethanolamine, histidine, which is a preferred buffer, arginine, lysine, or acetate or mixtures thereof. The term further encompasses any agents listed in the US Pharmacopeia for use in animals, including humans. A “pharmaceutically acceptable carrier” includes any and all physiologically acceptable, i.e., compatible, solvents, dispersion media, coatings, antimicrobial agents, isotonic and absorption delaying agents, and the like. In certain embodiments, the carrier is suitable for intravenous, intramuscular, subcutaneous, parenteral, spinal or epidermal administration (e.g., by injection or infusion). Depending on selected route of administration, the nucleic acid may be coated in a material or materials intended to protect the compound from the action of acids and other natural inactivating conditions to which the nucleic acid may be exposed when administered to a subject by a particular route of administration.

[0614] The term “solvate” in the context of the present invention refers to a complex of defined stoichiometry formed between a solute (in casu, a nucleic acid compound or pharmaceutically acceptable salt thereof according to the invention) and a solvent. The solvent in this connection may, for example, be water or another pharmaceutically acceptable, typically small-molecular organic species, such as, but not limited to, acetic acid or lactic acid. When the solvent in question is water, such a solvate is normally referred to as a hydrate.

[0615] The invention will now be described with reference to the following non-limiting Figures and Examples.

### BRIEF DESCRIPTION OF THE FIGURES

[0616] FIG. 1. Relative MASP-2 mRNA expression normalized to PP/B mRNA in primary cynomolgus monkey hepatocytes after treatment with GalNAc-siRNA conjugates targeting MASP-2 at five different concentrations of 100 nM, 20 nM, 4 nM, 0.8 nM, and 0.16 nM. Mean values relative to untreated (ut). Cells treated with MASP-2-unspecific siRNA were used as controls (Ctr).

[0617] FIG. 2. Relative MASP-2 mRNA expression normalized to PPIB mRNA in primary cynomolgus monkey hepatocytes after treatment with GalNAc-siRNA conjugates targeting MASP-2 at five different concentrations of 100 nM, 20 nM, 4 nM, 0.8 nM, and 0.16 nM. Mean values relative to untreated (ut). Cells treated with MASP-2-unspecific siRNA were used as controls (Ctr).

[0618] FIG. 3. Relative MASP-2 mRNA expression normalized to PPIB mRNA in primary human hepatocytes after treatment with GalNAc-siRNA conjugates targeting MASP-2 at five different concentrations of 100 nM, 20 nM, 4 nM, 0.8 nM, and 0.16 nM. Mean values relative to untreated (ut). Cells treated with MASP-2-unspecific siRNA were used as controls (Ctr).

[0619] FIG. 4. Relative MASP-2 mRNA expression normalized to PPIB mRNA in primary human hepatocytes after treatment with GalNAc-siRNA conjugates targeting MASP-2 at five different concentrations of 100 nM, 20 nM, 4 nM, 0.8 nM, and 0.16 nM. Mean values relative to untreated (ut). Cells treated with MASP-2-unspecific siRNA were used as controls (Ctr).

[0620] FIG. 5. Relative MASP-2 mRNA expression normalized to PPIB mRNA in primary mouse hepatocytes after treatment with GalNAc-siRNA conjugates targeting MASP-2 at five different concentrations of 100 nM, 10 nM, 1 nM, 0.1 nM, and 0.01 nM. Mean values relative to untreated (ut). Cells treated with MASP-2-unspecific siRNA were used as controls (Ctr).

[0621] FIG. 6. Relative MASP-2 mRNA expression normalized to APOB mRNA in liver samples isolated on day 15 following subcutaneous injection of GalNAc-siRNA conjugates targeting MASP-2 at two concentrations of 1 or 5 mg/kg. Mean values relative to PBS-treated controls.

[0622] FIG. 7. Relative MASP-2 mRNA expression normalized to PPIB mRNA in primary Cynomolgus monkey hepatocytes after treatment with GalNAc-siRNA conjugates targeting MASP-2 at five different concentrations of 100 nM, 20 nM, 4 nM, 0.8 nM, and 0.16 nM. Mean values relative to untreated (ut). Cells treated with MASP-2-unspecific siRNA were used as controls (Ctr).

[0623] FIG. 8. Relative MASP-2 mRNA expression normalized to PPIB mRNA in primary human hepatocytes after treatment with GalNAc-siRNA conjugates targeting MASP-2 at five different concentrations of 100 nM, 20 nM, 4 nM, 0.8 nM, and 0.16 nM. Mean values relative to untreated (ut). Cells treated with MASP-2-unspecific siRNA used as controls (Ctr).

[0624] FIG. 9. Relative MASP-2 mRNA expression normalized to PPIB mRNA in primary mouse hepatocytes after treatment with GalNAc-siRNA conjugates targeting Masp-2 at five different concentrations of 100 nM, 10 nM, 1 nM, 0.1 nM, and 0.01 nM. Mean values relative to untreated (ut). Cells treated with MASP-2-unspecific siRNA were used as controls (Ctr).

[0625] FIG. 10. MASP-2 protein levels change in cynomolgus monkey serum isolated at day 2, 3, 8, 15, 22, 29, and 57, normalized to pre-dose values, after a single subcutaneous injection of vehicle or GalNAc conjugated siRNAs EM1208, EM1209, or EM1211 at 3 mg/kg. Mean and SEM is shown.

[0626] FIG. 11. MASP-2 protein levels change in cynomolgus monkey serum isolated at day 3, 8, 15, 22, 29, 43, 57, 71, and 85, normalized to pre-dose values, after a single subcutaneous injection of vehicle or GalNAc conjugated siRNA EM1208 at 0.3, 1, 3, or 10 mg/kg. Mean and SEM is shown.

### EXAMPLES

### Example 1

[0627] In vitro study in HepG2 cells showing MASP-2 knockdown efficacy of tested siRNAs after transfection of 0.5 nM or 10 nM siRNA.

[0628] MASP-2 knockdown efficacy of siRNAs EM1001-EM1192 (Table A and Table 5b) was determined after transfection of 0.5 or 10 nM siRNA in HepG2 cells. The results are depicted in Table A below. At 10 nM remaining MASP-2 levels after knockdown reached a minimum of 42% and at 0.5 nM remaining MASP-2 levels reached a minimum of 63%. At 10 nM the most potent siRNAs were EM1172, EM1128, EM1137, EM1189, and EM1192.

[0629] For transfection of HepG2 cells with siRNAs, cells were seeded at a density of 15,000 cells/well in 96-well tissue culture plates (TPP, Cat. 92096, Switzerland). Transfection of siRNA was carried out with Lipofectamine RNAiMax (Invitrogen/Life Technologies, Cat. 13778-500, Germany) according to manufacturer's instructions directly before seeding. The dual dose screen was performed with MASP-2-siRNAs in triplicates at 10 nM and 0.5 nM, respectively, with scrambled siRNA and luciferase-targeting siRNA as unspecific controls. After 24 h of incubation with siRNAs, medium was removed, and cells were lysed in 250 μL Lysis Buffer (InviTrap RNA Cell HTS96 Kit/C (Stratec, Cat. 7061300400, Germany)) and then frozen at −80° C. RNA was isolated using the InviTrap RNA Cell HTS96 Kit/C (Stratec, Cat. 7061300400, Germany). RT-qPCR was performed using MASP-2 and HPRT specific primer probe sets and Takyon™ One-Step Low Rox Probe 5× MasterMix dTTP on the QuantStudio6 device from Applied Biosystems in single-plex 384 well format. Expression differences were calculated using the delta delta Ct method and relative expression of MASP-2 normalized to the house keeping gene HPRT was determined. Results are expressed as % remaining MASP-2 mRNA after siRNA transfection in Table A.

TABLE A
Results of dual dose screening (10 nM
and 0.5 nM) of siRNAs targeting MASP-2.
The identity of the single strands forming each of
the siRNA duplexes as well as their sequences and
modifications are to be found in Tables 5a and 5b.

| | |
|---|---|
| % remaining mRNA | % remaining mRNA |
| at 10 nM | at 0.5 nM |

| Duplex | Mean | SD | Mean | SD |
|---|---|---|---|---|
| EM1001 | 109 | 3 | 114 | 6 |
| EM1002 | 106 | 22 | 109 | 24 |
| EM1003 | 113 | 8 | 106 | 2 |
| EM1004 | 115 | 9 | 110 | 7 |
| EM1005 | 96 | 10 | 89 | 15 |
| EM1006 | 100 | 9 | 98 | 6 |
| EM1007 | 82 | 6 | 104 | 9 |
| EM1008 | 99 | 6 | 109 | 12 |
| EM1009 | 128 | 23 | 132 | 6 |
| EM1010 | 125 | 14 | 131 | 2 |
| EM1011 | 122 | 10 | 124 | 11 |
| EM1012 | 123 | 16 | 125 | 2 |
| EM1013 | 98 | 14 | 107 | 24 |
| EM1014 | 87 | 6 | 95 | 14 |
| EM1015 | 95 | 5 | 113 | 4 |
| EM1016 | 98 | 13 | 119 | 20 |
| EM1017 | 79 | 2 | 114 | 14 |
| EM1018 | 106 | 8 | 121 | 3 |
| EM1019 | 70 | 11 | 105 | 18 |
| EM1020 | 99 | 10 | 109 | 12 |
| EM1021 | 95 | 9 | 129 | 57 |
| EM1022 | 80 | 11 | 82 | 10 |
| EM1023 | 81 | 5 | 100 | 12 |
| EM1024 | 85 | 9 | 123 | 7 |
| EM1025 | 95 | 2 | 109 | 8 |
| EM1026 | 99 | 13 | 111 | 9 |
| EM1027 | 98 | 6 | 100 | 10 |
| EM1028 | 81 | 5 | 74 | 3 |
| EM1029 | 82 | 12 | 73 | 6 |
| EM1030 | 86 | 7 | 83 | 1 |
| EM1031 | 102 | 24 | 92 | 4 |
| EM1032 | 91 | 9 | 90 | 1 |
| EM1033 | 96 | 7 | 98 | 11 |
| EM1034 | 94 | 6 | 86 | 12 |
| EM1035 | 120 | 5 | 103 | 1 |
| EM1036 | 86 | 11 | 82 | 1 |
| EM1037 | 80 | 6 | 79 | 2 |
| EM1038 | 89 | 13 | 85 | 0 |
| EM1039 | 104 | 7 | 98 | 2 |
| EM1040 | 66 | 4 | 95 | 2 |
| EM1041 | 92 | 5 | 103 | 17 |
| EM1042 | 110 | 13 | 106 | 6 |
| EM1043 | 120 | 12 | 101 | 1 |
| EM1044 | 113 | 8 | 97 | 1 |
| EM1045 | 63 | 6 | 82 | 3 |
| EM1046 | 81 | 4 | 86 | 12 |
| EM1047 | 91 | 4 | 93 | 3 |
| EM1048 | 105 | 14 | 105 | 1 |
| EM1049 | 99 | 13 | 107 | 2 |
| EM1050 | 90 | 5 | 113 | 3 |
| EM1051 | 129 | 10 | 91 | 18 |
| EM1052 | 11 | 23 | 95 | 9 |
| EM1053 | 10 | 13 | 109 | 7 |
| EM1054 | 96 | 10 | 97 | 22 |
| EM1055 | 80 | 10 | 80 | 12 |
| EM1056 | 84 | 16 | 79 | 20 |
| EM1057 | 82 | 3 | 90 | 12 |
| EM1058 | 94 | 18 | 101 | 18 |
| EM1059 | 117 | 13 | 105 | 28 |
| EM1060 | 113 | 25 | 102 | 17 |
| EM1061 | 104 | 19 | 99 | 18 |
| EM1062 | 118 | 18 | 90 | 16 |
| EM1063 | 75 | 6 | 76 | 20 |
| EM1064 | 70 | 5 | 92 | 25 |
| EM1065 | 79 | 7 | 92 | 22 |
| EM1066 | 107 | 4 | 102 | 22 |
| EM1067 | 123 | 15 | 115 | 20 |
| EM1068 | 109 | 3 | 97 | 12 |
| EM1069 | 98 | 6 | 91 | 24 |
| EM1070 | 81 | 10 | 90 | 12 |
| EM1071 | 60 | 9 | 83 | 13 |
| EM1072 | 56 | 10 | 94 | 22 |
| EM1073 | 77 | 8 | 91 | 20 |
| EM1074 | 62 | 9 | 86 | 17 |
| EM1075 | 99 | 3 | 97 | 14 |
| EM1076 | 118 | 14 | 106 | 18 |
| EM1077 | 96 | 7 | 94 | 21 |
| EM1078 | 67 | 13 | 81 | 14 |
| EM1079 | 63 | 10 | 79 | 13 |
| EM1080 | 75 | 4 | 85 | 8 |
| EM1081 | 77 | 6 | 86 | 15 |
| EM1082 | 82 | 8 | 85 | 15 |
| EM1083 | 73 | 7 | 90 | 16 |
| EM1084 | 97 | 8 | 97 | 9 |
| EM1085 | 96 | 5 | 95 | 13 |
| EM1086 | 64 | 5 | 67 | 14 |
| EM1087 | 79 | 6 | 91 | 20 |
| EM1088 | 72 | 8 | 83 | 14 |
| EM1089 | 53 | 3 | 83 | 13 |
| EM1090 | 80 | 2 | 87 | 16 |
| EM1091 | 72 | 3 | 93 | 22 |
| EM1092 | 96 | 7 | 109 | 8 |
| EM1093 | 101 | 22 | 104 | 16 |
| EM1094 | 88 | 5 | 106 | 20 |
| EM1095 | 57 | 3 | 91 | 17 |
| EM1096 | 75 | 3 | 94 | 17 |
| EM1097 | 74 | 5 | 93 | 19 |
| EM1098 | 62 | 5 | 98 | 15 |
| EM1099 | 83 | 4 | 102 | 11 |
| EM1100 | 73 | 9 | 101 | 13 |
| EM1101 | 111 | 38 | 111 | 14 |
| EM1102 | 102 | 21 | 97 | 15 |
| EM1103 | 115 | 26 | 106 | 17 |
| EM1104 | 85 | 9 | 116 | 16 |
| EM1105 | 95 | 7 | 151 | 42 |
| EM1106 | 79 | 10 | 122 | 27 |
| EM1107 | 94 | 17 | 108 | 18 |
| EM1108 | 82 | 9 | 105 | 8 |
| EM1109 | 103 | 39 | 121 | 9 |
| EM1110 | 75 | 18 | 106 | 12 |
| EM1111 | 108 | 12 | 116 | 19 |
| EM1112 | 84 | 8 | 105 | 17 |
| EM1113 | 93 | 15 | 106 | 15 |
| EM1114 | 90 | 3 | 84 | 24 |
| EM1115 | 95 | 7 | 96 | 21 |
| EM1116 | 98 | 4 | 89 | 14 |
| EM1117 | 109 | 21 | 117 | 4 |
| EM1118 | 56 | 19 | 86 | 11 |
| EM1119 | 62 | 10 | 86 | 13 |
| EM1120 | 124 | 8 | 114 | 12 |
| EM1121 | 73 | 5 | 94 | 13 |
| EM1122 | 69 | 3 | 87 | 16 |
| EM1123 | 58 | 2 | 74 | 2 |
| EM1124 | 85 | 17 | 102 | 15 |
| EM1125 | 98 | 18 | 103 | 28 |
| EM1126 | 120 | 37 | 119 | 5 |
| EM1127 | 80 | 7 | 95 | 10 |
| EM1128 | 50 | 6 | 82 | 10 |
| EM1129 | 69 | 7 | 79 | 2 |
| EM1130 | 84 | 3 | 99 | 4 |
| EM1131 | 86 | 6 | 95 | 16 |
| EM1132 | 104 | 18 | 103 | 15 |
| EM1133 | 109 | 25 | 98 | 34 |
| EM1134 | 112 | 26 | 116 | 8 |
| EM1135 | 117 | 6 | 98 | 14 |
| EM1136 | 82 | 15 | 63 | 8 |
| EM1137 | 51 | 19 | 64 | 10 |
| EM1138 | 88 | 6 | 85 | 17 |
| EM1139 | 88 | 18 | 89 | 8 |
| EM1140 | 113 | 30 | 92 | 2 |
| EM1141 | 96 | 12 | 94 | 22 |
| EM1142 | 133 | 31 | 107 | 6 |
| EM1143 | 106 | 11 | 96 | 4 |
| EM1144 | 118 | 9 | 88 | 5 |
| EM1145 | 82 | 13 | 72 | 13 |
| EM1146 | 91 | 11 | 88 | 12 |
| EM1147 | 90 | 13 | 80 | 17 |
| EM1148 | 141 | 46 | 101 | 27 |
| EM1149 | 161 | 26 | 81 | 11 |
| EM1150 | 144 | 32 | 86 | 12 |
| EM1151 | 105 | 21 | 121 | 12 |
| EM1152 | 119 | 14 | 125 | 16 |
| EM1153 | 80 | 15 | 130 | 22 |
| EM1154 | 76 | 14 | 138 | 16 |
| EM1155 | 66 | 14 | 124 | 10 |
| EM1156 | 75 | 12 | 117 | 16 |
| EM1157 | 76 | 8 | 128 | 9 |
| EM1158 | 110 | 48 | 125 | 22 |
| EM1159 | 97 | 30 | 126 | 9 |
| EM1160 | 108 | 10 | 146 | 1 |
| EM1161 | 90 | 5 | 165 | 23 |
| EM1162 | 102 | 10 | 144 | 17 |
| EM1163 | 96 | 5 | 119 | 36 |
| EM1164 | 93 | 11 | 133 | 10 |
| EM1165 | 106 | 15 | 123 | 20 |
| EM1166 | 125 | 11 | 108 | 17 |
| EM1167 | 118 | 30 | 119 | 8 |
| EM1168 | 105 | 15 | 122 | 15 |
| EM1169 | 87 | 7 | 115 | 17 |
| EM1170 | 58 | 8 | 107 | 21 |
| EM1171 | 68 | 16 | 112 | 24 |
| EM1172 | 42 | 7 | 111 | 18 |
| EM1173 | 64 | 4 | 95 | 5 |
| EM1174 | 109 | 17 | 101 | 6 |
| EM1175 | 119 | 19 | 88 | 15 |
| EM1176 | 105 | 18 | 103 | 27 |
| EM1177 | 126 | 27 | 111 | 17 |
| EM1178 | 70 | 6 | 122 | 18 |
| EM1179 | 70 | 6 | 110 | 6 |
| EM1180 | 89 | 7 | 113 | 5 |
| EM1181 | 85 | 7 | 102 | 6 |
| EM1182 | 93 | 11 | 97 | 4 |
| EM1183 | 112 | 10 | 98 | 11 |
| EM1184 | 102 | 10 | 109 | 19 |
| EM1185 | 70 | 10 | 127 | 19 |
| EM1186 | 74 | 11 | 106 | 9 |
| EM1187 | 84 | 7 | 90 | 7 |
| EM1188 | 87 | 5 | 116 | 21 |
| EM1189 | 91 | 17 | 126 | 10 |
| EM1190 | 74 | 12 | 104 | 24 |
| EM1191 | 78 | 7 | 68 | 6 |
| EM1192 | 54 | 6 | 107 | 9 |

### Example 2

[0630] In vitro study in HepG2 cells showing MASP-2 knockdown efficacy of tested siRNAs after transfection of 5 nM or 10 nM siRNA.

[0631] MASP-2 knockdown efficacy of siRNAs EM1001-EM1192 (Table B and Table 5b) was determined after transfection of 5 or 10 nM siRNA in HepG2 cells. The results are depicted in Table B below. At 10 nM, remaining MASP-2 levels after knockdown reached a minimum of 42% and at 5 nM remaining MASP-2 levels reached a minimum of 45%, 10 nM the most potent siRNAs were EM1172, EM1128, EM1137, EM1089, and EM1192.

[0632] For transfection of HepG2 cells with siRNAs, cells were seeded at a density of 40,000 cells/well in 96-well tissue culture plates (TPP, Cat. 92096, Switzerland). Transfection of siRNA was carried out with Lipofectamine RNAiMax (Invitrogen/Life Technologies, Cat. 13778-500, Germany) according to manufacturer's instructions directly before seeding. The dual dose screen was performed with MASP-2-siRNAs in triplicates at 10 nM and 5 nM, respectively, with scrambled siRNA and luciferase-targeting siRNA as unspecific controls. After 24 h of incubation with siRNAs, medium was removed, and cells were lysed in 250 μL Lysis Buffer (InviTrap RNA Cell HTS96 Kit/C (Stratec, Cat. 7061300400, Germany)) and then frozen at −80° C. RNA was isolated using the InviTrap RNA Cell HTS96 Kit/C (Stratec, Cat. 7061300400, Germany). RT-qPCR was performed using MASP-2 and HPRT specific primer probe sets and Takyon™ One-Step Low Rox Probe 5× MasterMix dTTP on the QuantStudio6 device from Applied Biosystems in single-plex 384 well format. Expression differences were calculated using the delta delta Ct method and relative expression of MASP-2 normalized to the house keeping gene HPRT was determined. Results are expressed as % remaining MASP-2 mRNA after siRNA transfection in Table B.

TABLE B
Results of dual dose screening (10 nM
and 5 nM) of siRNAs targeting MASP-2.
The identity of the single strands forming each of
the siRNA duplexes as well as their sequences and
modifications are to be found in Tables 5a and 5b.

| | |
|---|---|
| % remaining mRNA | % remaining mRNA |
| at 10 nM | at 5 nM |

| Duplex | Mean | SD | Mean | SD |
|---|---|---|---|---|
| EM1001 | 109 | 3 | 123 | 20 |
| EM1002 | 106 | 22 | 140 | 32 |
| EM1003 | 113 | 8 | 154 | 35 |
| EM1004 | 115 | 9 | 159 | 16 |
| EM1005 | 96 | 10 | 151 | 18 |
| EM1006 | 100 | 9 | 184 | 37 |
| EM1007 | 82 | 6 | 123 | 17 |
| EM1008 | 99 | 6 | 146 | 19 |
| EM1009 | 128 | 23 | 161 | 39 |
| EM1010 | 125 | 14 | 144 | 37 |
| EM1011 | 122 | 10 | 139 | 45 |
| EM1012 | 123 | 16 | 134 | 17 |
| EM1013 | 98 | 14 | 183 | 2 |
| EM1014 | 87 | 6 | 176 | 15 |
| EM1015 | 95 | 5 | 134 | 9 |
| EM1016 | 98 | 13 | 111 | 22 |
| EM1017 | 79 | 2 | 83 | 5 |
| EM1018 | 106 | 8 | 100 | 37 |
| EM1019 | 70 | 11 | 50 | 6 |
| EM1020 | 99 | 10 | 134 | 17 |
| EM1021 | 95 | 9 | 154 | 37 |
| EM1022 | 80 | 11 | 125 | 35 |
| EM1023 | 81 | 5 | 113 | 27 |
| EM1024 | 85 | 9 | 133 | 41 |
| EM1025 | 95 | 2 | 105 | 16 |
| EM1026 | 99 | 13 | 134 | 18 |
| EM1027 | 98 | 6 | 124 | 9 |
| EM1028 | 81 | 5 | 140 | 30 |
| EM1029 | 82 | 12 | 149 | 26 |
| EM1030 | 86 | 7 | 103 | 6 |
| EM1031 | 102 | 24 | 121 | 38 |
| EM1032 | 91 | 9 | 92 | 7 |
| EM1033 | 96 | 7 | 109 | 25 |
| EM1034 | 94 | 6 | 110 | 27 |
| EM1035 | 120 | 5 | 121 | 34 |
| EM1036 | 86 | 11 | 132 | 33 |
| EM1037 | 80 | 6 | 115 | 11 |
| EM1038 | 89 | 13 | 108 | 26 |
| EM1039 | 104 | 7 | 105 | 10 |
| EM1040 | 66 | 4 | 74 | 18 |
| EM1041 | 92 | 5 | 102 | 22 |
| EM1042 | 110 | 13 | 148 | 36 |
| EM1043 | 120 | 12 | 136 | 29 |
| EM1044 | 113 | 8 | 164 | 48 |
| EM1045 | 63 | 6 | 84 | 10 |
| EM1046 | 81 | 4 | 149 | 66 |
| EM1047 | 91 | 4 | 129 | 51 |
| EM1048 | 105 | 14 | 113 | 11 |
| EM1049 | 99 | 13 | 104 | 14 |
| EM1050 | 90 | 5 | 105 | 6 |
| EM1051 | 129 | 10 | 111 | 2 |
| EM1052 | 111 | 23 | 138 | 17 |
| EM1053 | 101 | 13 | 132 | 13 |
| EM1054 | 96 | 10 | 126 | 30 |
| EM1055 | 80 | 10 | 180 | 17 |
| EM1056 | 84 | 16 | 216 | 51 |
| EM1057 | 82 | 3 | 126 | 12 |
| EM1058 | 94 | 18 | 103 | 4 |
| EM1059 | 117 | 13 | 123 | 6 |
| EM1060 | 113 | 25 | 126 | 23 |
| EM1061 | 104 | 19 | 124 | 29 |
| EM1062 | 118 | 18 | 151 | 10 |
| EM1063 | 75 | 6 | 144 | 10 |
| EM1064 | 70 | 5 | 152 | 26 |
| EM1065 | 79 | 7 | 110 | 5 |
| EM1066 | 107 | 4 | 104 | 8 |
| EM1067 | 123 | 15 | 117 | 21 |
| EM1068 | 109 | 3 | 102 | 5 |
| EM1069 | 98 | 6 | 112 | 20 |
| EM1070 | 81 | 10 | 109 | 18 |
| EM1071 | 60 | 9 | 104 | 2 |
| EM1072 | 56 | 10 | 119 | 13 |
| EM1073 | 77 | 8 | 98 | 13 |
| EM1074 | 62 | 9 | 69 | 5 |
| EM1075 | 99 | 3 | 88 | 4 |
| EM1076 | 118 | 14 | 112 | 8 |
| EM1077 | 96 | 7 | 119 | 17 |
| EM1078 | 67 | 13 | 123 | 13 |
| EM1079 | 63 | 10 | 140 | 14 |
| EM1080 | 75 | 4 | 100 | 23 |
| EM1081 | 77 | 6 | 103 | 16 |
| EM1082 | 82 | 8 | 90 | 16 |
| EM1083 | 73 | 7 | 71 | 4 |
| EM1084 | 97 | 8 | 117 | 19 |
| EM1085 | 96 | 5 | 118 | 27 |
| EM1086 | 64 | 5 | 104 | 23 |
| EM1087 | 79 | 6 | 124 | 26 |
| EM1088 | 72 | 8 | 103 | 17 |
| EM1089 | 53 | 3 | 74 | 17 |
| EM1090 | 80 | 2 | 115 | 19 |
| EM1091 | 72 | 3 | 86 | 20 |
| EM1092 | 96 | 7 | 130 | 2 |
| EM1093 | 101 | 22 | 108 | 14 |
| EM1094 | 88 | 5 | 110 | 15 |
| EM1095 | 57 | 3 | 93 | 24 |
| EM1096 | 75 | 3 | 98 | 39 |
| EM1097 | 74 | 5 | 99 | 6 |
| EM1098 | 62 | 5 | 83 | 6 |
| EM1099 | 83 | 4 | 83 | 12 |
| EM1100 | 73 | 9 | 61 | 13 |
| EM1101 | 111 | 38 | 103 | 6 |
| EM1102 | 102 | 21 | 141 | 18 |
| EM1103 | 115 | 26 | 145 | 41 |
| EM1104 | 85 | 9 | 165 | 20 |
| EM1105 | 95 | 7 | 218 | 42 |
| EM1106 | 79 | 10 | 227 | 79 |
| EM1107 | 94 | 17 | 108 | 13 |
| EM1108 | 82 | 9 | 101 | 11 |
| EM1109 | 103 | 39 | 101 | 5 |
| EM1110 | 75 | 18 | 73 | 3 |
| EM1111 | 108 | 12 | 124 | 38 |
| EM1112 | 84 | 8 | 106 | 16 |
| EM1113 | 93 | 15 | 185 | 39 |
| EM1114 | 90 | 3 | 187 | 50 |
| EM1115 | 95 | 7 | 134 | 27 |
| EM1116 | 98 | 4 | 105 | 29 |
| EM1117 | 109 | 21 | 103 | 10 |
| EM1118 | 56 | 19 | 49 | 16 |
| EM1119 | 62 | 10 | 77 | 17 |
| EM1120 | 124 | 8 | 179 | 20 |
| EM1121 | 73 | 5 | 104 | 22 |
| EM1122 | 69 | 3 | 83 | 19 |
| EM1123 | 58 | 2 | 45 | 11 |
| EM1124 | 85 | 17 | 93 | 11 |
| EM1125 | 98 | 18 | 100 | 13 |
| EM1126 | 120 | 37 | 126 | 9 |
| EM1127 | 80 | 7 | 77 | 6 |
| EM1128 | 50 | 6 | 72 | 23 |
| EM1129 | 69 | 7 | 104 | 21 |
| EM1130 | 84 | 3 | 117 | 30 |
| EM1131 | 86 | 6 | 92 | 12 |
| EM1132 | 104 | 18 | 100 | 8 |
| EM1133 | 109 | 25 | 86 | 9 |
| EM1134 | 112 | 26 | 116 | 12 |
| EM1135 | 117 | 6 | 99 | 6 |
| EM1136 | 82 | 15 | 117 | 30 |
| EM1137 | 51 | 19 | 52 | 18 |
| EM1138 | 88 | 6 | 117 | 31 |
| EM1139 | 88 | 18 | 103 | 20 |
| EM1140 | 113 | 30 | 105 | 29 |
| EM1141 | 96 | 12 | 88 | 10 |
| EM1142 | 133 | 31 | 138 | 10 |
| EM1143 | 106 | 11 | 78 | 21 |
| EM1144 | 118 | 9 | 113 | 6 |
| EM1145 | 82 | 13 | 92 | 8 |
| EM1146 | 91 | 11 | 66 | 31 |
| EM1147 | 90 | 13 | 93 | 6 |
| EM1148 | 141 | 46 | 87 | 9 |
| EM1149 | 161 | 26 | 95 | 5 |
| EM1150 | 144 | 32 | 97 | 14 |
| EM1151 | 105 | 21 | 126 | 9 |
| EM1152 | 119 | 14 | 124 | 15 |
| EM1153 | 80 | 15 | 100 | 8 |
| EM1154 | 76 | 14 | 97 | 8 |
| EM1155 | 66 | 14 | 57 | 19 |
| EM1156 | 75 | 12 | 112 | 27 |
| EM1157 | 76 | 8 | 94 | 8 |
| EM1158 | 110 | 48 | 112 | 8 |
| EM1159 | 97 | 30 | 110 | 27 |
| EM1160 | 108 | 10 | 135 | 12 |
| EM1161 | 90 | 5 | 118 | 6 |
| EM1162 | 102 | 10 | 126 | 15 |
| EM1163 | 96 | 5 | 126 | 22 |
| EM1164 | 93 | 11 | 113 | 20 |
| EM1165 | 106 | 15 | 100 | 5 |
| EM1166 | 125 | 11 | 109 | 8 |
| EM1167 | 118 | 30 | 116 | 18 |
| EM1168 | 105 | 15 | 118 | 23 |
| EM1169 | 87 | 7 | 94 | 15 |
| EM1170 | 58 | 8 | 70 | 7 |
| EM1171 | 68 | 16 | 105 | 23 |
| EM1172 | 42 | 7 | 52 | 8 |
| EM1173 | 64 | 4 | 54 | 8 |
| EM1174 | 109 | 17 | 94 | 14 |
| EM1175 | 119 | 19 | 89 | 5 |
| EM1176 | 105 | 18 | 121 | 6 |
| EM1177 | 126 | 27 | 106 | 15 |
| EM1178 | 70 | 6 | 90 | 9 |
| EM1179 | 70 | 6 | 74 | 16 |
| EM1180 | 89 | 7 | 84 | 11 |
| EM1181 | 85 | 7 | 89 | 9 |
| EM1182 | 93 | 11 | 107 | 13 |
| EM1183 | 112 | 10 | 108 | 10 |
| EM1184 | 102 | 10 | 113 | 12 |
| EM1185 | 70 | 10 | 92 | 6 |
| EM1186 | 74 | 11 | 81 | 26 |
| EM1187 | 84 | 7 | 90 | 4 |
| EM1188 | 87 | 5 | 101 | 17 |
| EM1189 | 91 | 17 | 104 | 0 |
| EM1190 | 74 | 12 | 76 | 8 |
| EM1191 | 78 | 7 | 51 | 4 |
| EM1192 | 54 | 6 | 69 | 6 |

### Example 3

[0633] In vitro study in HepG2 cells showing MASP-2 knockdown efficacy of tested siRNAs after transfection of 20, 4, 0.8, or 0.16 nM siRNA.

[0634] MASP-2 knockdown efficacy of selected siRNAs (Table 3 and Table 5b) was determined after transfection of 20, 4, 0.8, or 0.16 nM siRNA in HepG2 cells. The results are depicted in Table 3 below. At 20 nM, remaining MASP-2 levels after knockdown reached a minimum of 22% and at 4 nM reached a minimum of 32%. At 20 nM the most potent siRNAs were EM1192, EM1074, EM1119, EM1089, and EM1155.

[0635] For transfection of HepG2 cells with siRNAs, cells were seeded at a density of 40,000 cells/well in 96-well tissue culture plates (TPP, Cat. 92096, Switzerland). Transfection of siRNA was carried out with Lipofectamine RNAiMax (Invitrogen/Life Technologies, Cat. 13778-500, Germany) according to manufacturer's instructions directly before seeding. The dose-response screen was performed with MASP-2 siRNAs in triplicates at 20, 4, 0.8, or 0.16 nM, respectively, with scrambled siRNA and luciferase-targeting siRNA as unspecific controls.

[0636] After 24 h of incubation with siRNAs, medium was removed, and cells were lysed in 250 μL Lysis Buffer (InviTrap RNA Cell HTS96 Kit/C (Stratec, Cat. 7061300400, Germany)) and then frozen at −80° C. RNA was isolated using the InviTrap RNA Cell HTS96 Kit/C (Stratec, Cat. 7061300400, Germany). RT-qPCR was performed using MASP-2 and HPRT specific primer probe sets and Takyon™ One-Step Low Rox Probe 5× MasterMix dTTP on the QuantStudio6 device from Applied Biosystems in single-plex 384 well format. Expression differences were calculated using the delta delta Ct method and relative expression of MASP-2 normalized to the house keeping gene HPRT was determined. Results are expressed as % remaining MASP-2 mRNA after siRNA transfection in Table 3.

TABLE 3
Results of dose-response screening (20, 4,
0.8, or 0.16 nM) of siRNAs targeting MASP-2.
The identity of the single strands forming each of
the siRNA duplexes as well as their sequences and
modifications are to be found in Tables 5a and 5b.

| | |
|---|---|
| Concentration | % remaining mRNA |

| Duplex | (nM) | Mean | SD |
|---|---|---|---|
| EM1019 | 20 | 32 | 11 |
| | 4 | 39 | 8 |
| | 0.8 | 46 | 5 |
| | 0.16 | 75 | 27 |
| EM1040 | 20 | 46 | 6 |
| | 4 | 50 | 9 |
| | 0.8 | 60 | 12 |
| | 0.16 | 78 | 22 |
| EM1045 | 20 | 34 | 10 |
| | 4 | 45 | 8 |
| | 0.8 | 58 | 8 |
| | 0.16 | 72 | 8 |
| EM1074 | 20 | 24 | 2 |
| | 4 | 33 | 4 |
| | 0.8 | 63 | 14 |
| | 0.16 | 100 | 20 |
| EM1089 | 20 | 25 | 3 |
| | 4 | 32 | 6 |
| | 0.8 | 62 | 14 |
| | 0.16 | 76 | 7 |
| EM1095 | 20 | 45 | 11 |
| | 4 | 62 | 11 |
| | 0.8 | 72 | 15 |
| | 0.16 | 80 | 19 |
| EM1098 | 20 | 44 | 4 |
| | 4 | 49 | 2 |
| | 0.8 | 67 | 5 |
| | 0.16 | 77 | 18 |
| EM1100 | 20 | 31 | 1 |
| | 4 | 41 | 5 |
| | 0.8 | 68 | 19 |
| | 0.16 | 82 | 9 |
| EM1118 | 20 | 31 | 6 |
| | 4 | 37 | 1 |
| | 0.8 | 64 | 5 |
| | 0.16 | 109 | 43 |
| EM1119 | 20 | 24 | 3 |
| | 4 | 37 | 1 |
| | 0.8 | 54 | 7 |
| | 0.16 | 81 | 5 |
| EM1123 | 20 | 27 | 9 |
| | 4 | 43 | 9 |
| | 0.8 | 64 | 9 |
| | 0.16 | 113 | 29 |
| EM1128 | 20 | 42 | 6 |
| | 4 | 48 | 4 |
| | 0.8 | 76 | 2 |
| | 0.16 | 83 | 4 |
| EM1137 | 20 | 60 | 9 |
| | 4 | 69 | 13 |
| | 0.8 | 89 | 4 |
| | 0.16 | 120 | 13 |
| EM1146 | 20 | 100 | 20 |
| | 4 | 106 | 9 |
| | 0.8 | 114 | 10 |
| | 0.16 | 75 | 4 |
| EM1155 | 20 | 27 | 5 |
| | 4 | 33 | 5 |
| | 0.8 | 44 | 2 |
| | 0.16 | 78 | 4 |
| EM1170 | 20 | 38 | 8 |
| | 4 | 52 | 14 |
| | 0.8 | 94 | 16 |
| | 0.16 | 116 | 13 |
| EM1172 | 20 | 41 | 0 |
| | 4 | 62 | 8 |
| | 0.8 | 105 | 29 |
| | 0.16 | 131 | 26 |
| EM1173 | 20 | 33 | 4 |
| | 4 | 46 | 3 |
| | 0.8 | 58 | 8 |
| | 0.16 | 88 | 10 |
| EM1191 | 20 | 28 | 5 |
| | 4 | 38 | 7 |
| | 0.8 | 62 | 8 |
| | 0.16 | 99 | 18 |
| EM1192 | 20 | 22 | 5 |
| | 4 | 33 | 7 |
| | 0.8 | 48 | 3 |
| | 0.16 | 63 | 5 |

### Example 4

[0637] In vitro study in primary cynomolgus monkey hepatocytes showing MASP-2 knockdown efficacy of tested GalNAc-siRNA conjugates.

[0638] Expression of MASP-2 mRNA was assessed after incubation with the GalNAc-siRNA conjugates EM1193, EM1194, EM1195, EM1196, EM1197, EM1198, EM1199, EM1200, EM1201, EM1202 (further described in Table 5c) at 100 nM, 20 nM, 4 nM, 0.8 nM and 0.16 nM. mRNA level of the house keeping gene PPIB served as control.

[0639] To test the knockdown efficacy of the GalNAc-conjugated siRNAs targeting MASP-2 in primary cynomolgus monkey hepatocytes, 45,000 cells per well (Supplier: Life Technologies) were added to siRNAs in plating medium (Life Technologies) for final concentrations between 100 nM and 0.16 nM in collagen-coated 96-well plates (Life Technologies). 24 hours post treatment, cells were lysed using InviTrap RNA Cell HTS96 Kit/C (Stratec). RT-qPCR was performed using mRNA-specific primers and probes against MASP-2 and PPIB. Expression differences were calculated using the delta delta Ct method and relative expression of MASP-2 normalized to the house keeping gene PPIB were determined. Results are expressed as ratio of MASP-2 to PPIB mRNA relative to untreated levels and can be found in FIG. 1.

[0640] Dose-dependent knockdown of MASP-2 mRNA was observed for eight tested GalNAc conjugates. At 100 nM remaining MASP-2 levels after knockdown were in the range of 11% to 86%. The strongest knockdown was observed at 100 nM with EM1201, EM1202, EM1200, and EM1198, with the remaining MASP-2 levels of 11%, 12%, 17%, and 18%, respectively.

### Example 5

[0641] In vitro study in primary cynomolgus monkey hepatocytes showing MASP-2 knockdown efficacy of tested GalNAc-siRNA conjugates.

[0642] Expression of MASP-2 mRNA was assessed after incubation with the GalNAc-siRNA conjugates EM1193, EM1194, EM1195, EM1196, EM1197, EM1198, EM1199, EM1200, EM1201, EM1202 (further described in Table 5c) at 100 nM, 20 nM, 4 nM, 0.8 nM and 0.16 nM. mRNA level of the house keeping gene PPIB served as control.

[0643] To test the knockdown efficacy of the GalNAc-conjugated siRNAs targeting MASP-2 in primary cynomolgus monkey hepatocytes, 45,000 cells per well (Supplier: Life Technologies) were added to siRNAs in plating medium (Life Technologies) for final concentrations between 100 nM and 0.16 nM in collagen-coated 96-well plates (Life Technologies). 24 hours post treatment, cells were lysed using InviTrap RNA Cell HTS96 Kit/C (Stratec). RT-qPCR was performed using mRNA-specific primers and probes against MASP-2 and PPIB. Expression differences were calculated using the delta delta Ct method and relative expression of MASP-2 normalized to the house keeping gene PPIB were determined. Results are expressed as ratio of MASP-2 to PPIB mRNA relative to untreated levels and can be found in FIG. 2.

[0644] Dose-dependent knockdown of MASP-2 mRNA was observed for eight tested GalNAc conjugates. At 100 nM remaining MASP-2 levels after knockdown were in the range of 17% to 80%. The strongest knockdown was observed at 100 nM with EM1201, EM1202, EM1200, and EM1198, with the remaining MASP-2 levels of 17%, 21%, 21%, and 24%, respectively.

### Example 6

[0645] In vitro study in primary human hepatocytes showing MASP-2 knockdown efficacy of tested GalNAc-siRNA conjugates.

[0646] Expression of MASP-2 mRNA was assessed after incubation with the GalNAc-siRNA conjugates EM1193, EM1194, EM1195, EM1196, EM1197, EM1198, EM1199, EM1200, EM1201, EM1202 (further described in Table 5c) at 100 nM, 20 nM, 4 nM, 0.8 nM and 0.16 nM. mRNA levels of the house keeping gene PPIB served as control.

[0647] To test the knockdown efficacy of the GalNAc-conjugated siRNAs targeting MASP-2 in primary human hepatocytes, 35,000 cells per well (Supplier: Life technologies) were added to siRNAs in plating medium (Life Technologies) for final concentrations between 100 nM and 0.16 nM in collagen-coated 96-well plates (Life technologies). 24 hours post treatment, cells were lysed using InviTrap RNA Cell HTS96 Kit/C (Stratec). RT-qPCR was performed using mRNA-specific primers and probes against MASP-2 and PPIB. Expression differences were calculated using the delta delta Ct method and relative expression of MASP-2 was normalized to expression of the house keeping gene PPIB. Results are expressed as ratio of MASP-2 to PPIB mRNA relative to untreated levels and can be found in FIG. 3.

[0648] Dose-dependent knockdown of MASP-2 mRNA was observed for five tested GalNAc conjugates. At 100 nM remaining MASP-2 levels after knockdown were in the range of 34% to 99%. The strongest knockdown was observed at 100 nM with EM1202, EM1201, EM1198, and EM1200, with the remaining MASP-2 levels of 40%, 42%, 45%, and 47%, respectively.

### Example 7

[0649] In vitro study in primary human hepatocytes showing MASP-2 knockdown efficacy of tested GalNAc-siRNA conjugates.

[0650] Expression of MASP-2 mRNA was assessed after incubation with the GalNAc-siRNA conjugates EM1193, EM1194, EM1195, EM1196, EM1197, EM1198, EM1199, EM1200, EM1201, EM1202 (further described in Table 5c) at 100 nM, 20 nM, 4 nM, 0.8 nM and 0.16 nM. mRNA levels of the house keeping gene PPIB served as control.

[0651] To test the knockdown efficacy of the GalNAc-conjugated siRNAs targeting MASP-2 in primary human hepatocytes, 35,000 cells per well (Supplier: Life technologies) were added to siRNAs in plating medium (Life Technologies) for final concentrations between 100 nM and 0.16 nM in collagen-coated 96-well plates (Life technologies). 24 hours post treatment, cells were lysed using InviTrap RNA Cell HTS96 Kit/C (Stratec). RT-qPCR was performed using mRNA-specific primers and probes against MASP-2 and PPIB. Expression differences were calculated using the delta delta Ct method and relative expression of MASP-2 was normalized to expression of the house keeping gene PPIB. Results are expressed as ratio of MASP-2 to PPIB mRNA relative to untreated levels and can be found in FIG. 4.

[0652] Dose-dependent knockdown of MASP-2 mRNA was observed for five tested GalNAc conjugates. At 100 nM remaining MASP-2 levels after knockdown were in the range of 37% to 88%. The strongest knockdown was observed at 100 nM with EM1201, EM1195, and EM1198, with the remaining MASP-2 levels of 37%, 37%, and 48%, respectively.

### Example 8

[0653] In vitro study in primary mouse hepatocytes showing MASP-2 knockdown efficacy of tested GalNAc-siRNA conjugates.

[0654] Expression of MASP-2 mRNA was assessed after incubation with the GalNAc-siRNA conjugates EM1193, EM1194, EM1195 (further described in Table 5c) at 100 nM, 10 nM, 1 nM, 0.1 nM and 0.01 nM. mRNA level of the house keeping gene PPIB served as control.

[0655] To test the knockdown efficacy of the GalNAc conjugated siRNAs for MASP-2 in primary mouse hepatocytes, 25,000 cells per well (Supplier: Life Technologies) were added to siRNAs in plating medium (Life Technologies) for final concentrations between 100 nM and 0.01 nM in collagen-coated 96-well plates (Life technologies). 24 hours post treatment, cells were lysed using InviTrap RNA Cell HTS96 Kit/C (Stratec). qPCR was performed using mRNA-specific primers and probes against MASP-2 and PPIB. Expression differences were calculated using the delta delta Ct method and relative expression of MASP-2 was normalized to expression of the house keeping gene PPIB. Results are expressed as ratio of MASP-2 to PPIB mRNA relative to untreated levels and can be found in FIG. 5.

[0656] Dose-dependent knockdown of MASP-2 mRNA was observed for all tested GalNAc conjugates. At 100 nM remaining MASP-2 levels after knockdown were in the range of 23% to 39%. The strongest knockdown was observed at 100 nM with EM1195 and EM1194, with the remaining MASP-2 levels of 23% and 25%, respectively.

### Example 9

[0657] In vivo study showing knockdown of MASP-2 mRNA in murine liver tissue after single subcutaneous dosing of 1 or 5 mg/kg GalNAc conjugated siRNA at two weeks post-dosing.

[0658] GalNAc-siRNA conjugates EM1193, EM1194, EM1195 (further described in Table 5c) were tested. mRNA level of the house keeping gene APOB served as housekeeping control.

[0659] Male C57BL/6 mice with an age of 8 weeks were obtained from Janvier, France. Animal experiments were performed according to ethical guidelines of the German Protection of Animals Act in its version of July 2013. Mice were randomized according to weight into groups of 4-5 mice. On day 1 of the study animals received a single subcutaneous dose of 1 or 5 mg/kg siRNA dissolved in phosphate buffered saline (PBS) or PBS only as control. The viability, body weight and behaviour of the mice was monitored during the study without pathological findings.

[0660] At day 15, the study was terminated, animals were euthanized, and liver samples were snap frozen and stored at −80° C. until further analysis. For analysis, in summary, total RNA was prepared with RNeasy Fibrous Tissue Mini Kit (QIAGEN, Venlo, Netherlands) according to the manufacturer's instruction. To assess the integrity of isolated RNA, automated electrophoresis was performed using a 2100 Bioanalyzer (Agilent Technologies, Inc., Santa Clara, USA). Per reaction, 100 ng total RNA was used for RT-qPCR with the amplicon sets specific for MASP-2 and APOB.

[0661] Expression differences were calculated using the delta delta Ct method and relative expression of MASP-2 versus the house keeping gene APOB normalized to the PBS was used for comparison of the different siRNAs. All tested GalNAc conjugates induced a dose-dependent knockdown of MASP-2 mRNA in liver. At 5 mg/kg remaining MASP-2 levels after knockdown were in the range of 28% to 61%. The maximum achieved knockdown of 72% was observed using EM1195 at 5 mg/kg siRNA (FIG. 6).

### Example 10

[0662] In vitro study in primary cynomolgus monkey hepatocytes showing MASP-2 knockdown efficacy of tested GalNAc-siRNA conjugates.

[0663] Expression of MASP-2 mRNA was assessed after incubation with siRNA conjugates EM1203, EM1204, EM1205, EM1206, EM1207, EM1208, EM1209, EM1210, EM1211, EM1212, EM1213 (further described in Table 5c) at 100 nM, 20 nM, 4 nM, 0.8 nM and 0.16 nM. mRNA level of the house keeping gene PPIB served as control.

[0664] To test the knockdown efficacy of the GalNAc conjugated siRNAs targeting MASP-2 in primary cynomolgus monkey hepatocytes, 45,000 cells per well (Supplier: Life Technologies and Primacyt) were seeded on collagen-coated 96-well plates (Life Technologies). siRNAs in concentrations between 100 nM and 0.16 nM were added immediately after seeding. 24 hours post treatment, cells were lysed using InviTrap RNA Cell HTS96 Kit/C (Stratec). RT-qPCR was performed using mRNA-specific primers and probes against MASP-2 and PPIB. Expression differences were calculated using the delta delta Ct method and relative expression of MASP-2 normalized to the house keeping gene PPIB were determined. Results are expressed as ratio of MASP-2 to PPIB mRNA relative to untreated levels and can be found in FIG. 7.

[0665] Dose-dependent knockdown of MASP-2 mRNA was observed for eight tested GalNAc conjugates. At 100 nM remaining MASP-2 levels after knockdown were in the range of 8% to 96%. The strongest knockdown was observed at 100 nM with EM1211, EM1208, EM1209, and EM1212, with the remaining MASP-2 levels of 8%, 11%, 12%, and 16%, respectively.

### Example 11

[0666] In vitro study in primary human hepatocytes showing MASP-2 knockdown efficacy of tested GalNAc-siRNA conjugates.

[0667] Expression of MASP-2 mRNA was assessed after incubation with GalNAc siRNA conjugates EM1203, EM1204, EM1205, EM1206, EM1207, EM1208, EM1209, EM1210, EM1211, EM1212, EM1213 (further described in Table 5c) at 100 nM, 20 nM, 4 nM, 0.8 nM and 0.16 nM. mRNA levels of the house keeping gene PPIB served as control.

[0668] To test the knockdown efficacy of the GalNAc conjugated siRNAs targeting MASP-2 in primary human hepatocytes 35,000 cells per well (Supplier: Life technologies) were seeded on collagen-coated 96-well plates (Life technologies). siRNAs in concentrations between 100 nM and 0.16 nM were added immediately after seeding. 24 hours post treatment, cells were lysed using InviTrap RNA Cell HTS96 Kit/C (Stratec). RT-qPCR was performed using mRNA-specific primers and probes against MASP-2 and PPIB. Expression differences were calculated using the delta delta Ct method and relative expression of MASP-2 was normalized to expression of the house keeping gene PPIB. Results are expressed as ratio of MASP-2 to PPIB mRNA relative to untreated levels and can be found in FIG. 8.

[0669] Dose-dependent knockdown of MASP-2 mRNA was observed for all tested GalNAc conjugates. At 100 nM remaining MASP-2 levels after knockdown were in the range of 10% to 86%. The strongest knockdown was observed at 100 nM with EM1211, EM1208, and EM1209, with the remaining MASP-2 levels of 10%, 22%, and 31%, respectively.

### Example 12

[0670] In vitro study in primary mouse hepatocytes showing MASP-2 knockdown efficacy of tested GalNAc-siRNA conjugates.

[0671] Expression of MASP-2 mRNA was assessed after incubation with GalNAc siRNA conjugates EM1203, EM1204 and EM1205 (further described in Table 5c) at 100 nM, 10 nM, 1 nM, 0.1 nM and 0.01 nM. mRNA level of the house keeping gene PPIB served as control.

[0672] To test the knockdown efficacy of the GalNAc conjugated siRNAs targeting MASP-2 in primary mouse hepatocytes, 25,000 cells per well (Supplier: Life Technologies and Primacyt) were seeded on collagen-coated 96-well plates (Life echnologies). siRNAs in concentrations between 100 nM and 0.01 nM were added immediately after seeding. 24 hours post treatment, cells were lysed using InviTrap RNA Cell HTS96 Kit/C (Stratec). qPCR was performed using mRNA-specific primers and probes against MASP-2 and PPIB. Expression differences were calculated using the delta delta Ct method and relative expression of MASP-2 was normalized to expression of the house keeping gene Ppib. Results are expressed as ratio of MASP-2 to PPIB mRNA relative to untreated levels and can be found in FIG. 9.

[0673] Dose-dependent knockdown of MASP-2 mRNA was observed for all tested GalNAc conjugates. At 100 nM remaining MASP-2 levels after knockdown were in the range of 19% to 38%. The strongest knockdown was observed at 100 nM with EM1204 and EM1205, with the remaining MASP-2 levels of 19% and 22%, respectively.

### Example 13

[0674] Synthesis of (vp)-mU-phos (Table 4) was performed as described in Prakash, Nucleic Acids Res. 2015, 43(6), 2993-3011 and Haraszti, Nucleic Acids Res. 2017, 45(13), 7581-7592. Synthesis of the phosphoramidite derivatives of ST41 (ST41-phos) (Table 4) as well as ST23 (ST23-phos) (Table 4) can be performed as described in WO2017/174657. Synthesis of phosphorthioamidites was performed as described in Caruthers, J. Org. Chem. 1996, 61, 4272-4281.

### Example 14

[0675] Example compounds were synthesized according to methods described below and known to persons of skill in the art. Assembly of the oligonucleotide chain and linker building blocks was performed by solid phase synthesis applying phosphoramidite methodology.

[0676] Downstream cleavage, deprotection and purification were performed following standard procedures that are well known in the art.

[0677] Oligonucleotide syntheses was performed on an AKTA oligopilot 10 using commercially available 2′O-Methyl RNA and 2′Fluoro-2′Deoxy RNA base loaded CPG (=controlled pore glass) solid support and phosphoramidites (all standard protection, ChemGenes, LinkTech) were used.

[0678] Ancillary reagents were purchased from EMP Biotech and Biosolve. Synthesis was performed using a 0.1 M solution of the phosphoramidite in dry acetonitrile (<20 ppm H₂O) and benzylthiotetrazole (BTT) was used as activator (0.3M in acetonitrile). Coupling time was 10 min. If phosphorthioamidites were used to introduce a phosphordithioate linkage (PS2) a repeated coupling wash cycle over 60 min was performed. A Cap/OX/Cap or Cap/Thio/Cap cycle was applied (Cap: Ac₂O (=acetic anhydride)/NMI (═N-methylimidazole)/Lutidine/Acetonitrile; OX (=Oxidizer): 0.05M I₂ in pyridine/H₂O; Thio=thiolation reagent, 50 mM EDITH (=3-ethoxy-1,2,4-dithiazoline-5-one)). Phosphorothioates and phosphordithioates were introduced using commercially available thiolation reagent 50 mM EDITH in acetonitrile (Link technologies). DMT (=dimethoxytrityl) cleavage was achieved by treatment with 3% dichloroacetic acid in toluene. Upon completion of the programmed synthesis cycles a diethylamine (DEA) wash was performed. All oligonucleotides were synthesized in DMT-off mode.

[0679] To synthesize tri-antennary GalNAc clusters ([ST23 (ps)]₃ ST41 (ps) and [ST23]₃ ST41, Table 4) ST23 (Table 4) and ST41 (Table 4) were introduced by successive coupling of the branching trebler amidite derivative (C4XLT-phos) followed by the GalNAc amidite (ST23-phos, Table 4). Attachment of (vp)-mU moiety (Table 4) was achieved by use of (vp)-mU-phos (Table 4) in the last synthesis cycle. The (vp)-mU-phos does not provide a hydroxy group suitable for further synthesis elongation and therefore, does not possess an DMT-group. Hence coupling of (vp)-mU-phos results in synthesis termination.

[0680] For the removal of the methyl esters masking the vinylphosphonate (vp), the CPG carrying the fully assembled oligonucleotide was dried under reduced pressure and transferred into a 20 mL PP (=polypropylene) syringe reactor for solid phase peptide synthesis equipped with a disc frit (Carl Roth GmbH). The CPG was then brought into contact with a solution of 250 μL TMSBr (=bromotrimethylsilane) and 177 μL pyridine in CH₂Cl₂ (0.5 mL/μmol solid support bound oligonucleotide) at room temperature and the reactor was sealed with a Luer cap. The reaction vessels were slightly agitated over a period of 2×15 min, the excess reagent discarded, and the residual CPG washed 2× with 10 mL acetonitrile. Further downstream processing did not alter from any other example compound.

[0681] The single strands were cleaved off the CPG by 40% aq. methylamine treatment (in presence of 20 mM DTT if phosphorodithioate linkages were present) in 90 min at RT (=room temperature). The resulting crude oligonucleotide was purified by ion exchange chromatography (Resource Q, 6 mL, GE Healthcare) on an AKTA Pure HPLC System using a sodium chloride gradient. Product containing fractions were pooled, desalted on a size exclusion column (Zetadex, EMP Biotech) and lyophilized until further use.

[0682] All final single-stranded products were analysed by AEX-HPLC to prove their purity. Identity of the respective single-stranded products was proved by LC-MS analysis.

### Example 15

[0683] Individual single strands were dissolved in a concentration of 60 OD/mL in H₂O. Both individual oligonucleotide solutions were added together in a reaction vessel. For easier reaction monitoring a titration was performed. The first strand was added in 25% excess over the second strand as determined by UV-absorption at 260 nm. The reaction mixture was heated to 80° C. for 5 min and then slowly cooled to RT. Double-strand formation was monitored by ion pairing reverse phase HPLC. From the UV-area of the residual single strand the needed amount of the second strand was calculated and added to the reaction mixture. The reaction was heated to 80° C. again and slowly cooled to RT. This procedure was repeated until less than 10% of residual single strand was detected.

### Example 16

[0684] In vitro study in HepG2 cells showing MASP-2 knockdown efficacy of tested siRNAs after transfection of 20, 4, 0.8, 0.16, or 0.032 nM siRNA.

[0685] MASP-2 knockdown efficacy of selected siRNAs (Table 5b) was determined after transfection of 20, 4, 0.8, or 0.16 nM siRNA in HepG2 cells. The results are depicted in Table 6 below. At 20 nM, remaining MASP-2 levels after knockdown reached a minimum of 22% and at 4 nM reached a minimum of 20%. At 20 nM the most potent siRNAs were EM1223 and EM1217.

[0686] For transfection of HepG2 cells with siRNAs, cells were seeded at a density of 40,000 cells/well in 96-well tissue culture plates (TPP, Cat. 92096, Switzerland). Transfection of siRNA was carried out with Lipofectamine RNAiMax (Invitrogen/Life Technologies, Cat. 13778-500, Germany) according to manufacturer's instructions directly before seeding. The dose-response screen was performed with MASP-2 siRNAs in triplicates at 20, 4, 0.8, 0.16, or 0.032 nM, respectively, with scrambled siRNA and luciferase-targeting siRNA as unspecific controls. After 24 h of incubation with siRNAs, medium was removed, and cells were lysed in 250 μL Lysis Buffer (InviTrap RNA Cell HTS96 Kit/C (Stratec, Cat. 7061300400, Germany)) and then frozen at −80° C. RNA was isolated using the InviTrap RNA Cell HTS96 Kit/C (Stratec, Cat. 7061300400, Germany). RT-qPCR was performed using MASP-2 and PPIB specific primer probe sets and Takyon™ One-Step Low Rox Probe 5× MasterMix dTTP on the QuantStudio6 device from Applied Biosystems in single-plex 384 well format. Expression differences were calculated using the delta delta Ct method and relative expression of MASP-2 normalized to the house keeping gene PPIB was determined. Results are expressed as % remaining MASP-2 mRNA after siRNA transfection in Table 6.

TABLE 6
Results of dose-response screening (20, 4,
0.8, 0.16, 0.032 nM) of siRNAs targeting MASP-2.
The identity of the single strands forming each of
the siRNA duplexes as well as their sequences and
modifications are to be found in Tables 5b.

| | |
|---|---|
| Concentration | % remaining mRNA |

| Duplex | (nM) | Mean | SD |
|---|---|---|---|
| EM1223 | 20 | 22 | 4 |
| | 4 | 20 | 4 |
| | 0.8 | 29 | 10 |
| | 0.16 | 40 | 8 |
| | 0.032 | 64 | 4 |
| EM1215 | 20 | 33 | 6 |
| | 4 | 28 | 3 |
| | 0.8 | 32 | 6 |
| | 0.16 | 47 | 4 |
| | 0.032 | 75 | 15 |
| EM1217 | 20 | 28 | 5 |
| | 4 | 32 | 4 |
| | 0.8 | 37 | 6 |
| | 0.16 | 50 | 7 |
| | 0.032 | 58 | 13 |

### Example 17

[0687] In vivo study showing knockdown of MASP-2 mRNA in non-human primates (NHP).

[0688] The objective of this experiment was to determine protein knockdown efficacy of siRNA GalNAc conjugates targeting MASP-2 in vivo in non-human primates (NHPs).

[0689] Purpose bred cynomolgus monkeys (8- to 15-year-old females) were allocated to different treatment groups (4 animals per group). On day 1, each group was treated with a single dose of 3 mg GalNAc siRNA per kg body weight by subcutaneous injection, while control animals received the vehicle, 0.9% saline, by subcutaneous injection. Series bleeding was conducted at a pre-dose (day −7 and day 1), day 2, 3, 8, 15, 22, 29, and 57. The expression of MASP-2 protein was measured in serum using specific ELISA assay (Abcam ab278121).

[0690] Results of MASP-2 protein level reduction over 8 weeks post single subcutaneous dose of GalNAc conjugated siRNAs EM1208, EM1209, and EM1211 are shown in FIG. 10. MASP-2 protein levels in cynomolgus monkey serum collected 3 weeks after single treatment with EM1208 were reduced on average by 89% and after 8 weeks by 91%. MASP-2 protein levels in cynomolgus monkey serum collected 3 weeks after single treatment with EM1209 were reduced on average by 74% and after 8 weeks by 55%. MASP-2 protein levels in cynomolgus monkey serum collected 3 weeks after single treatment with EM1211 were reduced on average by 55% and after 8 weeks by 20%.

### Example 18

[0691] The objective of the second experiment in NHPs was to determine the duration-of-action of a single siRNA GalNAc conjugate targeting MASP-2 by analyzing the protein knockdown efficacy.

[0692] Purpose bred cynomolgus monkeys (8- to 15-year-old naïve females) were allocated to different treatment groups (4 animals per group). On day 1, each group was treated with a single dose of either 0.3, 1, 3, or 10 mg GalNAc siRNA per kg body weight by subcutaneous injection, while control animals received the vehicle, 0.9% saline, by subcutaneous injection. Series bleeding was conducted at a pre-dose (day −7 and day 1), day 3, 8, 15, 22, 29, 43, 57, 71, and 85. The expression of MASP-2 protein was measured in serum using specific ELISA assay (Abcam ab278121).

[0693] Results of MASP-2 protein level reduction over 12 weeks post single subcutaneous dose of GalNAc conjugated siRNA EM1208 are shown in FIG. 11. Dose-dependent MASP-2 protein knockdown in cynomolgus monkey serum was observed after a single dose of EM1208. MASP-2 protein levels at 4 weeks after treatment with EM1208 at 10 mg/kg were reduced on average by 98%, after 8 weeks by 99%, and after 12 weeks by 95%. When EM1208 was dosed at 3 mg/kg, MASP-2 protein levels in serum collected 4 weeks were reduced on average by 91%, 8 weeks by 84%, and after 12 weeks by 62%.

TABLE 1
Summary of abbreviations

| Abbreviation | Meaning |
|---|---|
| mA, mU, | 2′-O-Methyl RNA nucleotides |
| mC, mG | |
| 2′-OMe | 2′-O-Methyl modification |
| fA, fU, | 2′ deoxy-2′-F RNA nucleotides |
| fC, fG | |
| 2′-F | 2′-fluoro modification |
| (ps) | phosphorothioate |
| (vp) | Vinyl-(E)-phosphonate |
| (vp)-mU | [chemical structure] |
| (vp)-mU- phos | [chemical structure] |
| ivA, ivC, ivU, ivG | inverted RNA (3′-3′) nucleotides |
| ST23 | [chemical structure] |
| ST23-phos | [chemical structure] |
| ST41 (or C4XLT) | [chemical structure] |
| ST41-phos (or C4XLT- phos) | [chemical structure] |
| Ser(GN) (when at the end of a chain, one of the O— is OH) | [chemical structure] |
| [ST23 (ps)]3 ST41 (ps) | [chemical structure] |
| [ST23]3 ST41 | [chemical structure] |

[0694] The abbreviations as shown in Table 4 may be used herein. The list of abbreviations may not be exhaustive and further abbreviations and their meaning may be found throughout this document.

### SUMMARY SEQUENCE TABLES

TABLE 5a
Unmodified duplexes

| Duplex | Strand Name | | |
|---|---|---|---|
| ID | (*) | Sequence (5′→3′) | SEQ ID No. |
| EM1001 | EM1001-A | GACUUGCCAAGGAAAAUCA | 1 |
| EM1001 | EM1001-B | UGAUUUUCCUUGGCAAGUC | 2 |
| EM1002 | EM1002-A | UGGGUAGAUCAUCAGGAGG | 3 |
| EM1002 | EM1002-B | CCUCCUGAUGAUCUACCCA | 4 |
| EM1003 | EM1003-A | UCCACAUCGAAGGACUCCA | 5 |
| EM1003 | EM1003-B | UGGAGUCCUUCGAUGUGGA | 6 |
| EM1004 | EM1004-A | UUGGCUUGCACAGGUGAAA | 7 |
| EM1004 | EM1004-B | UUUCACCUGUGCAAGCCAA | 8 |
| EM1005 | EM1005-A | AUUGUGUAGAAGGUCUCUU | 9 |
| EM1005 | EM1005-B | AAGAGACCUUCUACACAAU | 10 |
| EM1006 | EM1006-A | ACAGCUUUGUAGGUGGUCA | 11 |
| EM1006 | EM1006-B | UGACCACCUACAAAGCUGU | 12 |
| EM1007 | EM1007-A | AGUAGAGGCGCAGGCGGUA | 13 |
| EM1007 | EM1007-B | UACCGCCUGCGCCUCUACU | 14 |
| EM1008 | EM1008-A | UCUCCUUUGGAGCUCGUCC | 15 |
| EM1008 | EM1008-B | GGACGAGCUCCAAAGGAGA | 16 |
| EM1009 | EM1009-A | AGAAUCCAUCAGCCUCACA | 17 |
| EM1009 | EM1009-B | UGUGAGGCUGAUGGAUUCU | 18 |
| EM1010 | EM1010-A | GGUCCCAAGAUCCAUCUUU | 19 |
| EM1010 | EM1010-B | AAAGAUGGAUCUUGGGACC | 20 |
| EM1011 | EM1011-A | GCAUUGGCCGGUCCCAAGA | 21 |
| EM1011 | EM1011-B | UCUUGGGACCGGCCAAUGC | 22 |
| EM1012 | EM1012-A | CCACAAACAGGCUCACAGA | 23 |
| EM1012 | EM1012-B | UCUGUGAGCCUGUUUGUGG | 24 |
| EM1013 | EM1013-A | GUACUGAAUCACAGCUUUG | 25 |
| EM1013 | EM1013-B | CAAAGCUGUGAUUCAGUAC | 26 |
| EM1014 | EM1014-A | CUAAGCCAGCACAAAGCAU | 27 |
| EM1014 | EM1014-B | AUGCUUUGUGCUGGCUUAG | 28 |
| EM1015 | EM1015-A | UUCACAGCUGUACUGAAUC | 29 |
| EM1015 | EM1015-B | GAUUCAGUACAGCUGUGAA | 30 |
| EM1016 | EM1016-A | UAAGCCAGCACAAAGCAUG | 31 |
| EM1016 | EM1016-B | CAUGCUUUGUGCUGGCUUA | 32 |
| EM1017 | EM1017-A | AGUAGUCGGAGCGGAAGGU | 33 |
| EM1017 | EM1017-B | ACCUUCCGCUCCGACUACU | 34 |
| EM1018 | EM1018-A | UCUCGAUCCAGGGAAUAUA | 35 |
| EM1018 | EM1018-B | UAUAUUCCCUGGAUCGAGA | 36 |
| EM1019 | EM1019-A | UCGAAGUGGGUGAAGUAGA | 37 |
| EM1019 | EM1019-B | UCUACUUCACCCACUUCGA | 38 |
| EM1020 | EM1020-A | CUUGCCAAGGAAAAUCACC | 39 |
| EM1020 | EM1020-B | GGUGAUUUUCCUUGGCAAG | 40 |
| EM1021 | EM1021-A | GCAUGAGCAGCUGUUAGGA | 41 |
| EM1021 | EM1021-B | UCCUAACAGCUGCUCAUGC | 42 |
| EM1022 | EM1022-A | GGACACUAUUCCUCCCACA | 43 |
| EM1022 | EM1022-B | UGUGGGAGGAAUAGUGUCC | 44 |
| EM1023 | EM1023-A | UGUCUCCACAUCGAAGGAC | 45 |
| EM1023 | EM1023-B | GUCCUUCGAUGUGGAGACA | 46 |
| EM1024 | EM1024-A | GUGACAAAGGUGAUGGUCA | 47 |
| EM1024 | EM1024-B | UGACCAUCACCUUUGUCAC | 48 |
| EM1025 | EM1025-A | CUCUUCACAGCUGUACUGA | 49 |
| EM1025 | EM1025-B | UCAGUACAGCUGUGAAGAG | 50 |
| EM1026 | EM1026-A | AAGGUCUCUUCACAGCUGU | 51 |
| EM1026 | EM1026-B | ACAGCUGUGAAGAGACCUU | 52 |
| EM1027 | EM1027-A | GCAUAGAAGGCCUCGAACC | 53 |
| EM1027 | EM1027-B | GGUUCGAGGCCUUCUAUGC | 54 |
| EM1028 | EM1028-A | GUAGAUCAUCAGGAGGGCC | 55 |
| EM1028 | EM1028-B | GGCCCUCCUGAUGAUCUAC | 56 |
| EM1029 | EM1029-A | GAAUCACAGCUUUGUAGGU | 57 |
| EM1029 | EM1029-B | ACCUACAAAGCUGUGAUUC | 58 |
| EM1030 | EM1030-A | AAUCACAGCUUUGUAGGUG | 59 |
| EM1030 | EM1030-B | CACCUACAAAGCUGUGAUU | 60 |
| EM1031 | EM1031-A | UUAAUCAGUGCUAUGUCAU | 61 |
| EM1031 | EM1031-B | AUGACAUAGCACUGAUUAA | 62 |
| EM1032 | EM1032-A | UUAUGUUCUCGAUCCAGGG | 63 |
| EM1032 | EM1032-B | CCCUGGAUCGAGAACAUAA | 64 |
| EM1033 | EM1033-A | UUGCCAAGGAAAAUCACCA | 65 |
| EM1033 | EM1033-B | UGGUGAUUUUCCUUGGCAA | 66 |
| EM1034 | EM1034-A | CACAGGUUCAGGCCACUUC | 67 |
| EM1034 | EM1034-B | GAAGUGGCCUGAACCUGUG | 68 |
| EM1035 | EM1035-A | CAGCACAAAGCAUGUUAGC | 69 |
| EM1035 | EM1035-B | GCUAACAUGCUUUGUGCUG | 70 |
| EM1036 | EM1036-A | CACAUCGAAGGACUCCACA | 71 |
| EM1036 | EM1036-B | UGUGGAGUCCUUCGAUGUG | 72 |
| EM1037 | EM1037-A | UUGUGUAGACUCCAUACUG | 73 |
| EM1037 | EM1037-B | CAGUAUGGAGUCUACACAA | 74 |
| EM1038 | EM1038-A | CACAAUUCAUGGAACCCCA | 75 |
| EM1038 | EM1038-B | UGGGGUUCCAUGAAUUGUG | 76 |
| EM1039 | EM1039-A | UCCACAAACAGGCUCACAG | 77 |
| EM1039 | EM1039-B | CUGUGAGCCUGUUUGUGGA | 78 |
| EM1040 | EM1040-A | ACAGGUUCAGGCCACUUCG | 79 |
| EM1040 | EM1040-B | CGAAGUGGCCUGAACCUGU | 80 |
| EM1041 | EM1041-A | CUGUACUGAAUCACAGCUU | 81 |
| EM1041 | EM1041-B | AAGCUGUGAUUCAGUACAG | 82 |
| EM1042 | EM1042-A | GUCUCCACAUCGAAGGACU | 83 |
| EM1042 | EM1042-B | AGUCCUUCGAUGUGGAGAC | 84 |
| EM1043 | EM1043-A | UCGUCCAGAAUCCAUCAGC | 85 |
| EM1043 | EM1043-B | GCUGAUGGAUUCUGGACGA | 86 |
| EM1044 | EM1044-A | CCCAAGAUCCAUCUUUCUG | 87 |
| EM1044 | EM1044-B | CAGAAAGAUGGAUCUUGGG | 88 |
| EM1045 | EM1045-A | AAGUGGGUGAAGUAGAGGC | 89 |
| EM1045 | EM1045-B | GCCUCUACUUCACCCACUU | 90 |
| EM1046 | EM1046-A | CAUUAGAUUUCUAGCAAGA | 91 |
| EM1046 | EM1046-B | UCUUGCUAGAAAUCUAAUG | 92 |
| EM1047 | EM1047-A | CUCCACAUCGAAGGACUCC | 93 |
| EM1047 | EM1047-B | GGAGUCCUUCGAUGUGGAG | 94 |
| EM1048 | EM1048-A | CAGCUGUACUGAAUCACAG | 95 |
| EM1048 | EM1048-B | CUGUGAUUCAGUACAGCUG | 96 |
| EM1049 | EM1049-A | CAUGAGCAGCUGUUAGGAC | 97 |
| EM1049 | EM1049-B | GUCCUAACAGCUGCUCAUG | 98 |
| EM1050 | EM1050-A | GUCUGUUUGAAUCUUGAGA | 99 |
| EM1050 | EM1050-B | UCUCAAGAUUCAAACAGAC | 100 |
| EM1051 | EM1051-A | CCUUUGGAGCUCGUCCAGA | 101 |
| EM1051 | EM1051-B | UCUGGACGAGCUCCAAAGG | 102 |
| EM1052 | EM1052-A | GCUGUUAGGACCCAGUUGU | 103 |
| EM1052 | EM1052-B | ACAACUGGGUCCUAACAGC | 104 |
| EM1053 | EM1053-A | GGUAGAUCAUCAGGAGGGC | 105 |
| EM1053 | EM1053-B | GCCCUCCUGAUGAUCUACC | 106 |
| EM1054 | EM1054-A | GGGUAGAUCAUCAGGAGGG | 107 |
| EM1054 | EM1054-B | CCCUCCUGAUGAUCUACCC | 108 |
| EM1055 | EM1055-A | UGGCUUGCACAGGUGAAAC | 109 |
| EM1055 | EM1055-B | GUUUCACCUGUGCAAGCCA | 110 |
| EM1056 | EM1056-A | CUAUUCCUCCCACAAACCA | 111 |
| EM1056 | EM1056-B | UGGUUUGUGGGAGGAAUAG | 112 |
| EM1057 | EM1057-A | GAGUAGUCGGAGCGGAAGG | 113 |
| EM1057 | EM1057-B | CCUUCCGCUCCGACUACUC | 114 |
| EM1058 | EM1058-A | GAUCCAGGGAAUAUAGUUA | 115 |
| EM1058 | EM1058-B | UAACUAUAUUCCCUGGAUC | 116 |
| EM1059 | EM1059-A | AUUAGAUUUCUAGCAAGAA | 117 |
| EM1059 | EM1059-B | UUCUUGCUAGAAAUCUAAU | 118 |
| EM1060 | EM1060-A | GUUAGGACCCAGUUGUCAU | 119 |
| EM1060 | EM1060-B | AUGACAACUGGGUCCUAAC | 120 |
| EM1061 | EM1061-A | AUCCAGGGAAUAUAGUUAA | 121 |
| EM1061 | EM1061-B | UUAACUAUAUUCCCUGGAU | 122 |
| EM1062 | EM1062-A | AAGUCCAGAAUGACACUGA | 123 |
| EM1062 | EM1062-B | UCAGUGUCAUUCUGGACUU | 124 |
| EM1063 | EM1063-A | ACAUUUUUGAUGGUCAACA | 125 |
| EM1063 | EM1063-B | UGUUGACCAUCAAAAAUGU | 126 |
| EM1064 | EM1064-A | GAGCUCGUCCAGAAUCCAU | 127 |
| EM1064 | EM1064-B | AUGGAUUCUGGACGAGCUC | 128 |
| EM1065 | EM1065-A | GUGUAGAAGGUCUCUUCAC | 129 |
| EM1065 | EM1065-B | GUGAAGAGACCUUCUACAC | 130 |
| EM1066 | EM1066-A | CACUAUUCCUCCCACAAAC | 131 |
| EM1066 | EM1066-B | GUUUGUGGGAGGAAUAGUG | 132 |
| EM1067 | EM1067-A | ACACUAUUCCUCCCACAAA | 133 |
| EM1067 | EM1067-B | UUUGUGGGAGGAAUAGUGU | 134 |
| EM1068 | EM1068-A | UGUACUGAAUCACAGCUUU | 135 |
| EM1068 | EM1068-B | AAAGCUGUGAUUCAGUACA | 136 |
| EM1069 | EM1069-A | AACCCCAGGACACUAUUCC | 137 |
| EM1069 | EM1069-B | GGAAUAGUGUCCUGGGGUU | 138 |
| EM1070 | EM1070-A | CUUUGGAGCUCGUCCAGAA | 139 |
| EM1070 | EM1070-B | UUCUGGACGAGCUCCAAAG | 140 |
| EM1071 | EM1071-A | UAGUGGAUCUUCCAGCCUG | 141 |
| EM1071 | EM1071-B | CAGGCUGGAAGAUCCACUA | 142 |
| EM1072 | EM1072-A | GACACUAUUCCUCCCACAA | 143 |
| EM1072 | EM1072-B | UUGUGGGAGGAAUAGUGUC | 144 |
| EM1073 | EM1073-A | ACAUUAGAUUUCUAGCAAG | 145 |
| EM1073 | EM1073-B | CUUGCUAGAAAUCUAAUGU | 146 |
| EM1074 | EM1074-A | UCUCGUUGGAGUAGUCGGA | 147 |
| EM1074 | EM1074-B | UCCGACUACUCCAACGAGA | 148 |
| EM1075 | EM1075-A | CACAGCUGUACUGAAUCAC | 149 |
| EM1075 | EM1075-B | GUGAUUCAGUACAGCUGUG | 150 |
| EM1076 | EM1076-A | UGUCUGUUUGAAUCUUGAG | 151 |
| EM1076 | EM1076-B | CUCAAGAUUCAAACAGACA | 152 |
| EM1077 | EM1077-A | ACUGAAUCACAGCUUUGUA | 153 |
| EM1077 | EM1077-B | UACAAAGCUGUGAUUCAGU | 154 |
| EM1078 | EM1078-A | GUCCAGAAUCCAUCAGCCU | 155 |
| EM1078 | EM1078-B | AGGCUGAUGGAUUCUGGAC | 156 |
| EM1079 | EM1079-A | ACUUGCCAAGGAAAAUCAC | 157 |
| EM1079 | EM1079-B | GUGAUUUUCCUUGGCAAGU | 158 |
| EM1080 | EM1080-A | UCACAGCUGUACUGAAUCA | 159 |
| EM1080 | EM1080-B | UGAUUCAGUACAGCUGUGA | 160 |
| EM1081 | EM1081-A | AGCUCGUCCAGAAUCCAUC | 161 |
| EM1081 | EM1081-B | GAUGGAUUCUGGACGAGCU | 162 |
| EM1082 | EM1082-A | AUCUUCCAGCCUGUGUGGU | 163 |
| EM1082 | EM1082-B | ACCACACAGGCUGGAAGAU | 164 |
| EM1083 | EM1083-A | UGGAGUAGUCGGAGCGGAA | 165 |
| EM1083 | EM1083-B | UUCCGCUCCGACUACUCCA | 166 |
| EM1084 | EM1084-A | CUCGAUCCAGGGAAUAUAG | 167 |
| EM1084 | EM1084-B | CUAUAUUCCCUGGAUCGAG | 168 |
| EM1085 | EM1085-A | UACUGAAUCACAGCUUUGU | 169 |
| EM1085 | EM1085-B | ACAAAGCUGUGAUUCAGUA | 170 |
| EM1086 | EM1086-A | UCCAGAAUCCAUCAGCCUC | 171 |
| EM1086 | EM1086-B | GAGGCUGAUGGAUUCUGGA | 172 |
| EM1087 | EM1087-A | AAGGAUUCAGCUUCUUUUC | 173 |
| EM1087 | EM1087-B | GAAAAGAAGCUGAAUCCUU | 174 |
| EM1088 | EM1088-A | UGAAUCACAGCUUUGUAGG | 175 |
| EM1088 | EM1088-B | CCUACAAAGCUGUGAUUCA | 176 |
| EM1089 | EM1089-A | GUGGGUGAAGUAGAGGCGC | 177 |
| EM1089 | EM1089-B | GCGCCUCUACUUCACCCAC | 178 |
| EM1090 | EM1090-A | CCAGAAUCCAUCAGCCUCA | 179 |
| EM1090 | EM1090-B | UGAGGCUGAUGGAUUCUGG | 180 |
| EM1091 | EM1091-A | CAUUGUGUAGAAGGUCUCU | 181 |
| EM1091 | EM1091-B | AGAGACCUUCUACACAAUG | 182 |
| EM1092 | EM1092-A | UUUGGCUUGCACAGGUGAA | 183 |
| EM1092 | EM1092-B | UUCACCUGUGCAAGCCAAA | 184 |
| EM1093 | EM1093-A | CAAUUCAUGGAACCCCAGG | 185 |
| EM1093 | EM1093-B | CCUGGGGUUCCAUGAAUUG | 186 |
| EM1094 | EM1094-A | CUUCACAGCUGUACUGAAU | 187 |
| EM1094 | EM1094-B | AUUCAGUACAGCUGUGAAG | 188 |
| EM1095 | EM1095-A | GCUGCAUAGAAGGCCUCGA | 189 |
| EM1095 | EM1095-B | UCGAGGCCUUCUAUGCAGC | 190 |
| EM1096 | EM1096-A | GAAUCCAUCAGCCUCACAC | 191 |
| EM1096 | EM1096-B | GUGUGAGGCUGAUGGAUUC | 192 |
| EM1097 | EM1097-A | AAUCCAUCAGCCUCACACA | 193 |
| EM1097 | EM1097-B | UGUGUGAGGCUGAUGGAUU | 194 |
| EM1098 | EM1098-A | AGUGGGUGAAGUAGAGGCG | 195 |
| EM1098 | EM1098-B | CGCCUCUACUUCACCCACU | 196 |
| EM1099 | EM1099-A | CUCGUCCAGAAUCCAUCAG | 197 |
| EM1099 | EM1099-B | CUGAUGGAUUCUGGACGAG | 198 |
| EM1100 | EM1100-A | UUGGAGUAGUCGGAGCGGA | 199 |
| EM1100 | EM1100-B | UCCGCUCCGACUACUCCAA | 200 |
| EM1101 | EM1101-A | ACAAUUCAUGGAACCCCAG | 201 |
| EM1101 | EM1101-B | CUGGGGUUCCAUGAAUUGU | 202 |
| EM1102 | EM1102-A | GGUCUCUUCACAGCUGUAC | 203 |
| EM1102 | EM1102-B | GUACAGCUGUGAAGAGACC | 204 |
| EM1103 | EM1103-A | ACAGCUGUACUGAAUCACA | 205 |
| EM1103 | EM1103-B | UGUGAUUCAGUACAGCUGU | 206 |
| EM1104 | EM1104-A | CGAUCCAGGGAAUAUAGUU | 207 |
| EM1104 | EM1104-B | AACUAUAUUCCCUGGAUCG | 208 |
| EM1105 | EM1105-A | CUCCUUUGGAGCUCGUCCA | 209 |
| EM1105 | EM1105-B | UGGACGAGCUCCAAAGGAG | 210 |
| EM1106 | EM1106-A | UAGAUCAUCAGGAGGGCCA | 211 |
| EM1106 | EM1106-B | UGGCCCUCCUGAUGAUCUA | 212 |
| EM1107 | EM1107-A | CCACAAUUCAUGGAACCCC | 213 |
| EM1107 | EM1107-B | GGGGUUCCAUGAAUUGUGG | 214 |
| EM1108 | EM1108-A | CAUAGAAGGCCUCGAACCC | 215 |
| EM1108 | EM1108-B | GGGUUCGAGGCCUUCUAUG | 216 |
| EM1109 | EM1109-A | UUGGAGCUCGUCCAGAAUC | 217 |
| EM1109 | EM1109-B | GAUUCUGGACGAGCUCCAA | 218 |
| EM1110 | EM1110-A | UUCUCGUUGGAGUAGUCGG | 219 |
| EM1110 | EM1110-B | CCGACUACUCCAACGAGAA | 220 |
| EM1111 | EM1111-A | AUGUUCUCGAUCCAGGGAA | 221 |
| EM1111 | EM1111-B | UUCCCUGGAUCGAGAACAU | 222 |
| EM1112 | EM1112-A | AGGUGCGCUUGUUACGGUG | 223 |
| EM1112 | EM1112-B | CACCGUAACAAGCGCACCU | 224 |
| EM1113 | EM1113-A | CCUCCAUAUAUACGCCCUC | 225 |
| EM1113 | EM1113-B | GAGGGCGUAUAUAUGGAGG | 226 |
| EM1114 | EM1114-A | UGCUAUGUCAUUGUCAAAG | 227 |
| EM1114 | EM1114-B | CUUUGACAAUGACAUAGCA | 228 |
| EM1115 | EM1115-A | AAAAUCACCAGGUUUUGCC | 229 |
| EM1115 | EM1115-B | GGCAAAACCUGGUGAUUUU | 230 |
| EM1116 | EM1116-A | CUCAUAAAGGAUUCAGCUU | 231 |
| EM1116 | EM1116-B | AAGCUGAAUCCUUUAUGAG | 232 |
| EM1117 | EM1117-A | UUCAUAUGCAGCAGUACAU | 233 |
| EM1117 | EM1117-B | AUGUACUGCUGCAUAUGAA | 234 |
| EM1118 | EM1118-A | UUGACGAAGUCGUACUCGC | 235 |
| EM1118 | EM1118-B | GCGAGUACGACUUCGUCAA | 236 |
| EM1119 | EM1119-A | UAGUCGGAGCGGAAGGUAA | 237 |
| EM1119 | EM1119-B | UUACCUUCCGCUCCGACUA | 238 |
| EM1120 | EM1120-A | UGAUAGUCCACAAACAGGC | 239 |
| EM1120 | EM1120-B | GCCUGUUUGUGGACUAUCA | 240 |
| EM1121 | EM1121-A | GUCUUCACAGGCAUUUCUA | 241 |
| EM1121 | EM1121-B | UAGAAAUGCCUGUGAAGAC | 242 |
| EM1122 | EM1122-A | UGAAUCUUGAGAAAGUCGU | 243 |
| EM1122 | EM1122-B | ACGACUUUCUCAAGAUUCA | 244 |
| EM1123 | EM1123-A | UCGGAGCGGAAGGUAAUGU | 245 |
| EM1123 | EM1123-B | ACAUUACCUUCCGCUCCGA | 246 |
| EM1124 | EM1124-A | CACCUGGAGUCUGUUUUUU | 247 |
| EM1124 | EM1124-B | AAAAAACAGACUCCAGGUG | 248 |
| EM1125 | EM1125-A | UUAUUCAAUUUAAUCAGUG | 249 |
| EM1125 | EM1125-B | CACUGAUUAAAUUGAAUAA | 250 |
| EM1126 | EM1126-A | AAAGGAUUCAGCUUCUUUU | 251 |
| EM1126 | EM1126-B | AAAAGAAGCUGAAUCCUUU | 252 |
| EM1127 | EM1127-A | GUAGUCGGAGCGGAAGGUA | 253 |
| EM1127 | EM1127-B | UACCUUCCGCUCCGACUAC | 254 |
| EM1128 | EM1128-A | AGUCGGAGCGGAAGGUAAU | 255 |
| EM1128 | EM1128-B | AUUACCUUCCGCUCCGACU | 256 |
| EM1129 | EM1129-A | CAUAUAAAAGUGCACCUGC | 257 |
| EM1129 | EM1129-B | GCAGGUGCACUUUUAUAUG | 258 |
| EM1130 | EM1130-A | CAUAUAUACGCCCUCCUGU | 259 |
| EM1130 | EM1130-B | ACAGGAGGGCGUAUAUAUG | 260 |
| EM1131 | EM1131-A | UCCAUAUAUACGCCCUCCU | 261 |
| EM1131 | EM1131-B | AGGAGGGCGUAUAUAUGGA | 262 |
| EM1132 | EM1132-A | UAUUGAUUACAACUUUGUU | 263 |
| EM1132 | EM1132-B | AACAAAGUUGUAAUCAAUA | 264 |
| EM1133 | EM1133-A | UACAACUUUGUUAUUCAAU | 265 |
| EM1133 | EM1133-B | AUUGAAUAACAAAGUUGUA | 266 |
| EM1134 | EM1134-A | UUGCCUUUUGCCCUCCAUA | 267 |
| EM1134 | EM1134-B | UAUGGAGGGCAAAAGGCAA | 268 |
| EM1135 | EM1135-A | UAAUAUCAGGACUUGCCAA | 269 |
| EM1135 | EM1135-B | UUGGCAAGUCCUGAUAUUA | 270 |
| EM1136 | EM1136-A | UCGUAGGGACACAGGGUUU | 271 |
| EM1136 | EM1136-B | AAACCCUGUGUCCCUACGA | 272 |
| EM1137 | EM1137-A | UCGUCAAUGUCCUCGGCUG | 273 |
| EM1137 | EM1137-B | CAGCCGAGGACAUUGACGA | 274 |
| EM1138 | EM1138-A | CCCUCCAUAUAUACGCCCU | 275 |
| EM1138 | EM1138-B | AGGGCGUAUAUAUGGAGGG | 276 |
| EM1139 | EM1139-A | UCCAGAAUGACACUGAACC | 277 |
| EM1139 | EM1139-B | GGUUCAGUGUCAUUCUGGA | 278 |
| EM1140 | EM1140-A | AAAGCCAGCAUCAUGAGUA | 279 |
| EM1140 | EM1140-B | UACUCAUGAUGCUGGCUUU | 280 |
| EM1141 | EM1141-A | AUAUACGCCCUCCUGUUGU | 281 |
| EM1141 | EM1141-B | ACAACAGGAGGGCGUAUAU | 282 |
| EM1142 | EM1142-A | UAUGUCAUUGUCAAAGCCA | 283 |
| EM1142 | EM1142-B | UGGCUUUGACAAUGACAUA | 284 |
| EM1143 | EM1143-A | AUACUCCCCUGGAAAGCCG | 285 |
| EM1143 | EM1143-B | CGGCUUUCCAGGGGAGUAU | 286 |
| EM1144 | EM1144-A | AUCAUGAGUAUAACCUUCA | 287 |
| EM1144 | EM1144-B | UGAAGGUUAUACUCAUGAU | 288 |
| EM1145 | EM1145-A | UGGCAGACAAAUAGGCGUG | 289 |
| EM1145 | EM1145-B | CACGCCUAUUUGUCUGCCA | 290 |
| EM1146 | EM1146-A | UCUUUCAGGAUGUAUUUGG | 291 |
| EM1146 | EM1146-B | CCAAAUACAUCCUGAAAGA | 292 |
| EM1147 | EM1147-A | UUGAAUCUUGAGAAAGUCG | 293 |
| EM1147 | EM1147-B | CGACUUUCUCAAGAUUCAA | 294 |
| EM1148 | EM1148-A | CUUGCCCCCACUUUCUAAG | 295 |
| EM1148 | EM1148-B | CUUAGAAAGUGGGGGCAAG | 296 |
| EM1149 | EM1149-A | AGUUCCAAUGUCAUCUGUC | 297 |
| EM1149 | EM1149-B | GACAGAUGACAUUGGAACU | 298 |
| EM1150 | EM1150-A | CUUGAGAAAGUCGUAGGGA | 299 |
| EM1150 | EM1150-B | UCCCUACGACUUUCUCAAG | 300 |
| EM1151 | EM1151-A | UUUCAUUGUGUAGAAGGUC | 301 |
| EM1151 | EM1151-B | GACCUUCUACACAAUGAAA | 302 |
| EM1152 | EM1152-A | GCCAGUAUGAAAAGAGACU | 303 |
| EM1152 | EM1152-B | AGUCUCUUUUCAUACUGGC | 304 |
| EM1153 | EM1153-A | AGCUUGACGAAGUCGUACU | 305 |
| EM1153 | EM1153-B | AGUACGACUUCGUCAAGCU | 306 |
| EM1154 | EM1154-A | CAGGUGCGCUUGUUACGGU | 307 |
| EM1154 | EM1154-B | ACCGUAACAAGCGCACCUG | 308 |
| EM1155 | EM1155-A | GACGAAGUCGUACUCGCAG | 309 |
| EM1155 | EM1155-B | CUGCGAGUACGACUUCGUC | 310 |
| EM1156 | EM1156-A | AGGUAAUGUCCAGGCUGGA | 311 |
| EM1156 | EM1156-B | UCCAGCCUGGACAUUACCU | 312 |
| EM1157 | EM1157-A | UGACGAAGUCGUACUCGCA | 313 |
| EM1157 | EM1157-B | UGCGAGUACGACUUCGUCA | 314 |
| EM1158 | EM1158-A | CUGUGCUCGUGUAGUGGAU | 315 |
| EM1158 | EM1158-B | AUCCACUACACGAGCACAG | 316 |
| EM1159 | EM1159-A | UCAUAAAGGAUUCAGCUUC | 317 |
| EM1159 | EM1159-B | GAAGCUGAAUCCUUUAUGA | 318 |
| EM1160 | EM1160-A | ACAUACAUUAGAUUUCUAG | 319 |
| EM1160 | EM1160-B | CUAGAAAUCUAAUGUAUGU | 320 |
| EM1161 | EM1161-A | CAUACAUUAGAUUUCUAGC | 321 |
| EM1161 | EM1161-B | GCUAGAAAUCUAAUGUAUG | 322 |
| EM1162 | EM1162-A | AGCAUCAUGAGUAUAACCU | 323 |
| EM1162 | EM1162-B | AGGUUAUACUCAUGAUGCU | 324 |
| EM1163 | EM1163-A | CUUCAUGUAUAAAAACAGC | 325 |
| EM1163 | EM1163-B | GCUGUUUUUAUACAUGAAG | 326 |
| EM1164 | EM1164-A | AGACAAAUAGGCGUGAUGU | 327 |
| EM1164 | EM1164-B | ACAUCACGCCUAUUUGUCU | 328 |
| EM1165 | EM1165-A | ACAAAUAGGCGUGAUGUUG | 329 |
| EM1165 | EM1165-B | CAACAUCACGCCUAUUUGU | 330 |
| EM1166 | EM1166-A | AUUGAUUACAACUUUGUUA | 331 |
| EM1166 | EM1166-B | UAACAAAGUUGUAAUCAAU | 332 |
| EM1167 | EM1167-A | UGUCAUCUGUCCUCAUAAA | 333 |
| EM1167 | EM1167-B | UUUAUGAGGACAGAUGACA | 334 |
| EM1168 | EM1168-A | AUGAGUAUAACCUUCAUGU | 335 |
| EM1168 | EM1168-B | ACAUGAAGGUUAUACUCAU | 336 |
| EM1169 | EM1169-A | CUCGUCAAUGUCCUCGGCU | 337 |
| EM1169 | EM1169-B | AGCCGAGGACAUUGACGAG | 338 |
| EM1170 | EM1170-A | CUUGACGAAGUCGUACUCG | 339 |
| EM1170 | EM1170-B | CGAGUACGACUUCGUCAAG | 340 |
| EM1171 | EM1171-A | UUAAUCCCCAUCCAGAUGC | 341 |
| EM1171 | EM1171-B | GCAUCUGGAUGGGGAUUAA | 342 |
| EM1172 | EM1172-A | GUACUCGCAGAGGUGGGAG | 343 |
| EM1172 | EM1172-B | CUCCCACCUCUGCGAGUAC | 344 |
| EM1173 | EM1173-A | AUAGAAGGCCUCGAACCCC | 345 |
| EM1173 | EM1173-B | GGGGUUCGAGGCCUUCUAU | 346 |
| EM1174 | EM1174-A | AUUUAAUCAGUGCUAUGUC | 347 |
| EM1174 | EM1174-B | GACAUAGCACUGAUUAAAU | 348 |
| EM1175 | EM1175-A | AUGUCAUCUGUCCUCAUAA | 349 |
| EM1175 | EM1175-B | UUAUGAGGACAGAUGACAU | 350 |
| EM1176 | EM1176-A | AGUAUGAAAAGAGACUGGC | 351 |
| EM1176 | EM1176-B | GCCAGUCUCUUUUCAUACU | 352 |
| EM1177 | EM1177-A | GUUAGCAGUUACACUUCCC | 353 |
| EM1177 | EM1177-B | GGGAAGUGUAACUGCUAAC | 354 |
| EM1178 | EM1178-A | AGCCAGUAUGAAAAGAGAC | 355 |
| EM1178 | EM1178-B | GUCUCUUUUCAUACUGGCU | 356 |
| EM1179 | EM1179-A | GAUGUAUUUGGCUUGCACA | 357 |
| EM1179 | EM1179-B | UGUGCAAGCCAAAUACAUC | 358 |
| EM1180 | EM1180-A | AAUGCCAACAGCCAGUAUG | 359 |
| EM1180 | EM1180-B | CAUACUGGCUGUUGGCAUU | 360 |
| EM1181 | EM1181-A | AGCAUGUUAGCAGUUACAC | 361 |
| EM1181 | EM1181-B | GUGUAACUGCUAACAUGCU | 362 |
| EM1182 | EM1182-A | UGUCAUAUAAAAGUGCACC | 363 |
| EM1182 | EM1182-B | GGUGCACUUUUAUAUGACA | 364 |
| EM1183 | EM1183-A | GCCAACAGCCAGUAUGAAA | 365 |
| EM1183 | EM1183-B | UUUCAUACUGGCUGUUGGC | 366 |
| EM1184 | EM1184-A | ACAAAGUCCAGAAUGACAC | 367 |
| EM1184 | EM1184-B | GUGUCAUUCUGGACUUUGU | 368 |
| EM1185 | EM1185-A | AGGUUCAGGCCACUUCGGG | 369 |
| EM1185 | EM1185-B | CCCGAAGUGGCCUGAACCU | 370 |
| EM1186 | EM1186-A | CUAAUAUCAGGACUUGCCA | 371 |
| EM1186 | EM1186-B | UGGCAAGUCCUGAUAUUAG | 372 |
| EM1187 | EM1187-A | UCUGUGACAAAGGUGAUGG | 373 |
| EM1187 | EM1187-B | CCAUCACCUUUGUCACAGA | 374 |
| EM1188 | EM1188-A | UUUCAUAUGCAGCAGUACA | 375 |
| EM1188 | EM1188-B | UGUACUGCUGCAUAUGAAA | 376 |
| EM1189 | EM1189-A | AAGACCUGGCCGGAGCACA | 377 |
| EM1189 | EM1189-B | UGUGCUCCGGCCAGGUCUU | 378 |
| EM1190 | EM1190-A | UCAUGGUGUGCCCGUCCAG | 379 |
| EM1190 | EM1190-B | CUGGACGGGCACACCAUGA | 380 |
| EM1191 | EM1191-A | GAAGGUAAUGUCCAGGCUG | 381 |
| EM1191 | EM1191-B | CAGCCUGGACAUUACCUUC | 382 |
| EM1192 | EM1192-A | AAGUCGUACUCGCAGAGGU | 383 |
| EM1192 | EM1192-B | ACCUCUGCGAGUACGACUU | 384 |
| EM1214 | EM1214-A | UUGGGUGAAGUAGAGGCGC | 385 |
| EM1214 | EM1214-B | GCGCCUCUACUUCACCCAC | 178 |
| EM1215 | EM1215-A | UACGAAGUCGUACUCGCAG | 386 |
| EM1215 | EM1215-B | CUGCGAGUACGACUUCGUC | 310 |
| EM1216 | EM1216-A | UUAGAAGGCCUCGAACCCC | 387 |
| EM1216 | EM1216-B | GGGGUUCGAGGCCUUCUAU | 346 |
| EM1217 | EM1217-A | UAAGGUAAUGUCCAGGCUG | 388 |
| EM1217 | EM1217-B | CAGCCUGGACAUUACCUUC | 382 |
| EM1218 | EM1218-A | UAGUCGUACUCGCAGAGGU | 389 |
| EM1218 | EM1218-B | ACCUCUGCGAGUACGACUU | 384 |

[0695] The duplexes listed in Table 5b have various modifications as shown, with reference to Table 4 for an explanation of the abbreviations used. Where appropriate, the sequence of the equivalent unmodified strand from Table 5a is also indicated.

TABLE 5b
Modified duplexes

| | | | | Unmodified |
|---|---|---|---|---|
| | Strand | | | equivalent |
| Duplex ID | Name (*) | Sequence (5′→3′) | SEQ ID No. | SEQ ID No. |
| EM1001 | EM1001-A | mG (ps) fA (ps) mC fU mU fG mC fC mA fA mG fG mA fA mA fA mU (ps) fC (ps) mA | 390 | 1 |
| EM1001 | EM1001-B | mU (ps) mG (ps) mA mU mU mU fU fC fC mU mU mG mG mC mA mA mG (ps) mU (ps) mC | 391 | 2 |
| EM1002 | EM1002-A | mU (ps) fG (ps) mG fG mU fA mG fA mU fC mA fU mC fA mG fG mA (ps) fG (ps) mG | 392 | 3 |
| EM1002 | EM1002-B | mC (ps) mC (ps) mU mC mC mU fG fA fU mG mA mU mC mU mA mC mC (ps) mC (ps) mA | 393 | 4 |
| EM1003 | EM1003-A | mU (ps) fC (ps) mC fA mC fA mU fC mG fA mA fG mG fA mC fU mC (ps) fC (ps) mA | 394 | 5 |
| EM1003 | EM1003-B | mU (ps) mG (ps) mG mA mG mU fC fC fU mU mC mG mA mU mG mU mG (ps) mG (ps) mA | 395 | 6 |
| EM1004 | EM1004-A | mU (ps) fU (ps) mG fG mC fU mU fG mC fA mC fA mG fG mU fG mA (ps) fA (ps) mA | 396 | 7 |
| EM1004 | EM1004-B | mU (ps) mU (ps) mU mC mA mC fC fU fG mU mG mC mA mA mG mC mC (ps) mA (ps) mA | 397 | 8 |
| EM1005 | EM1005-A | mA (ps) fU (ps) mU fG mU fG mU fA mG fA mA fG mG fU mC fU mC (ps) fU (ps) mU | 398 | 9 |
| EM1005 | EM1005-B | mA (ps) mA (ps) mG mA mG mA fC fC fU mU mC mU mA mC mA mC mA (ps) mA (ps) mU | 399 | 10 |
| EM1006 | EM1006-A | mA (ps) fC (ps) mA fG mC fU mU fU mG fU mA fG mG fU mG fG mU (ps) fC (ps) mA | 400 | 11 |
| EM1006 | EM1006-B | mU (ps) mG (ps) mA mC mC mA fC fC fU mA mC mA mA mA mG mC mU (ps) mG (ps) mU | 401 | 12 |
| EM1007 | EM1007-A | mA (ps) fG (ps) mU fA mG fA mG fG mC fG mC fA mG fG mC fG mG (ps) fU (ps) mA | 402 | 13 |
| EM1007 | EM1007-B | mU (ps) mA (ps) mC mC mG mC fC fU fG mC mG mC mC mU mC mU mA (ps) mC (ps) mU | 403 | 14 |
| EM1008 | EM1008-A | mU (ps) fC (ps) mU fC mC fU mU fU mG fG mA fG mC fU mC fG mU (ps) fC (ps) mC | 404 | 15 |
| EM1008 | EM1008-B | mG (ps) mG (ps) mA mC mG mA fG fC fU mC mC mA mA mA mG mG mA (ps) mG (ps) mA | 405 | 16 |
| EM1009 | EM1009-A | mA (ps) fG (ps) mA fA mU fC mC fA mU fC mA fG mC fC mU fC mA (ps) fC (ps) mA | 406 | 17 |
| EM1009 | EM1009-B | mU (ps) mG (ps) mU mG mA mG fG FC fU mG mA mU mG mG mA mU mU (ps) mC (ps) mU | 407 | 18 |
| EM1010 | EM1010-A | mG (ps) fG (ps) mU fC mC fC mA fA mG fA mU fC mC fA mU fC mU (ps) fU (ps) mU | 408 | 19 |
| EM1010 | EM1010-B | mA (ps) mA (ps) mA mG mA mU fG fG fA mU mC mU mU mG mG mG mA (ps) mC (ps) mC | 409 | 20 |
| EM1011 | EM1011-A | mG (ps) fC (ps) mA fU mU fG mG fC mC fG mG fU mC fC mC fA mA (ps) fG (ps) mA | 410 | 21 |
| EM1011 | EM1011-B | mU (ps) mC (ps) mU mU mG mG fG fA fC mC mG mG mC mC mA mA mU (ps) mG (ps) mC | 411 | 22 |
| EM1012 | EM1012-A | mC (ps) fC (ps) mA fC mA fA mA fC mA fG mG fC mU fC mA fC mA (ps) fG (ps) mA | 412 | 23 |
| EM1012 | EM1012-B | mU (ps) mC (ps) mU mG mU mG fA fG fC mC mU mG mU mU mU mG mU (ps) mG (ps) mG | 413 | 24 |
| EM1013 | EM1013-A | mG (ps) fU (ps) mA fC mU fG mA fA mU fC mA fC mA fG mC fU mU (ps) fU (ps) mG | 414 | 25 |
| EM1013 | EM1013-B | mC (ps) mA (ps) mA mA mG mC fU fG fU mG mA mU mU mC mA mG mU (ps) mA (ps) mC | 415 | 26 |
| EM1014 | EM1014-A | mC (ps) fU (ps) mA fA mG fC mC fA mG fC mA fC mA fA mA fG mC (ps) fA (ps) mU | 416 | 27 |
| EM1014 | EM1014-B | mA (ps) mU (ps) mG mC mU mU fU fG fU mG mC mU mG mG mC mU mU (ps) mA (ps) mG | 417 | 28 |
| EM1015 | EM1015-A | mU (ps) fU (ps) mC fA mC fA mG fC mU fG mU fA mC fU mG fA mA (ps) fU (ps) mC | 418 | 29 |
| EM1015 | EM1015-B | mG (ps) mA (ps) mU mU mC mA fG fU fA mC mA mG mC mU mG mU mG (ps) mA (ps) mA | 419 | 30 |
| EM1016 | EM1016-A | mU (ps) fA (ps) mA fG mC fC mA fG mC fA mC fA mA fA mG fC mA (ps) fU (ps) mG | 420 | 31 |
| EM1016 | EM1016-B | mC (ps) mA (ps) mU mG mC mU fU fU fG mU mG mC mU mG mG mC mU (ps) mU (ps) mA | 42: | 32 |
| EM1017 | EM1017-A | mA (ps) fG (ps) mU fA mG fU mC fG mG fA mG fC mG fG mA fA mG (ps) fG (ps) mU | 422 | 33 |
| EM1017 | EM1017-B | mA (ps) mC (ps) mC mU mU mC fC fG fC mU mC mC mG mA mC mU mA (ps) mC (ps) mU | 423 | 34 |
| EM1018 | EM1018-A | mU (ps) fC (ps) mU fC mG fA mU fC mC fA mG fG mG fA mA fU mA (ps) fU (ps) mA | 424 | 35 |
| EM1018 | EM1018-B | mU (ps) mA (ps) mU mA mU mU fC fC fC mU mG mG mA mU mC mG mA (ps) mG (ps) mA | 425 | 36 |
| EM1019 | EM1019-A | mU (ps) fC (ps) mG fA mA fG mU fG mG fG mU fG mA fA mG fU mA (ps) fG (ps) mA | 426 | 37 |
| EM1019 | EM1019-B | mU (ps) mC (ps) mU mA mC mU fU fC fA mC mC mC mA mC mU mU mC (ps) mG (ps) mA | 427 | 38 |
| EM1020 | EM1020-A | mC (ps) fU (ps) mU fG mC fC mA fA mG fG mA fA mA fA mU fC mA (ps) fC (ps) mC | 428 | 39 |
| EM1020 | EM1020-B | mG (ps) mG (ps) mU mG mA mU fU fU fU mC mC mU mU mG mG mC mA (ps) mA (ps) mG | 429 | 40 |
| EM1021 | EM1021-A | mG (ps) fC (ps) mA fU mG fA mG fC mA fG mC fU mG fU mU fA mG (ps) fG (ps) mA | 430 | 41 |
| EM1021 | EM1021-B | mU (ps) mC (ps) mC mU mA mA fC fA fG mC mU mG mC mU mC mA mU (ps) mG (ps) mC | 431 | 42 |
| EM1022 | EM1022-A | mG (ps) fG (ps) mA fC mA fC mU fA mU fU mC fC mU fC mC fC mA (ps) fC (ps) mA | 432 | 43 |
| EM1022 | EM1022-B | mU (ps) mG (ps) mU mG mG mG fA fG fG mA mA mU mA mG mU mG mU (ps) mC (ps) mC | 433 | 44 |
| EM1023 | EM1023-A | mU (ps) fG (ps) mU fC mU fC mC fA mC fA mU fC mG fA mA fG mG (ps) fA (ps) mC | 434 | 45 |
| EM1023 | EM1023-B | mG (ps) mU (ps) mC mC mU mU fC fG fA mU mG mU mG mG mA mG mA (ps) mC (ps) mA | 435 | 46 |
| EM1024 | EM1024-A | mG (ps) fU (ps) mG fA mC fA mA fA mG fG mU fG mA fU mG fG mU (ps) fC (ps) mA | 436 | 47 |
| EM1024 | EM1024-B | mU (ps) mG (ps) mA mC mC mA fU fC fA mC mC mU mU mU mG mU mC (ps) mA (ps) mC | 437 | 48 |
| EM1025 | EM1025-A | mC (ps) fU (ps) mC fU mU fC mA fC mA fG mC fU mG fU mA fC mU (ps) fG (ps) mA | 438 | 49 |
| EM1025 | EM1025-B | mU (ps) mC (ps) mA mG mU mA fC fA fG mC mU mG mU mG mA mA mG (ps) mA (ps) mG | 439 | 50 |
| EM1026 | EM1026-A | mA (ps) fA (ps) mG fG mU fC mU fC mU fU mC fA mC fA mG fC mU (ps) fG (ps) mU | 440 | 51 |
| EM1026 | EM1026-B | mA (ps) mC (ps) mA mG mC mU fG fU fG mA mA mG mA mG mA mC mC (ps) mU (ps) mU | 441 | 52 |
| EM1027 | EM1027-A | mG (ps) fC (ps) mA fU mA fG mA fA mG fG mC fC mU fC mG fA mA (ps) fC (ps) mC | 442 | 53 |
| EM1027 | EM1027-B | mG (ps) mG (ps) mU mU mC mG fA fG fG mC mC mU mU mC mU mA mU (ps) mG (ps) mC | 443 | 54 |
| EM1028 | EM1028-A | mG (ps) fU (ps) mA fG mA fU mC fA mU fC mA fG mG fA mG fG mG (ps) fC (ps) mC | 444 | 55 |
| EM1028 | EM1028-B | mG (ps) mG (ps) mC mC mC mU fC fC fU mG mA mU mG mA mU mC mU (ps) mA (ps) mC | 445 | 56 |
| EM1029 | EM1029-A | mG (ps) fA (ps) mA fU mC fA mC fA mG fC mU fU mU fG mU fA mG (ps) fG (ps) mU | 446 | 57 |
| EM1029 | EM1029-B | mA (ps) mC (ps) mC mU mA mC fA fA fA mG mC mU mG mU mG mA mU (ps) mU (ps) mC | 447 | 58 |
| EM1030 | EM1030-A | mA (ps) fA (ps) mU fC mA fC mA fG mC fU mU fU mG fU mA fG mG (ps) fU (ps) mG | 448 | 59 |
| EM1030 | EM1030-B | mC (ps) mA (ps) mC mC mU mA fC fA fA mA mG mC mU mG mU mG mA (ps) mU (ps) mU | 449 | 60 |
| EM1031 | EM1031-A | mU (ps) fU (ps) mA fA mU fC mA fG mU fG mC fU mA fU mG fU mC (ps) fA (ps) mU | 450 | 61 |
| EM1031 | EM1031-B | mA (ps) mU (ps) mG mA mC mA fU fA fG mC mA mC mU mG mA mU mU (ps) mA (ps) mA | 451 | 62 |
| EM1032 | EM1032-A | mU (ps) fU (ps) mA fU mG fU mU fC mU fC mG fA mU fC mC fA mG (ps) fG (ps) mG | 452 | 63 |
| EM1032 | EM1032-B | mC (ps) mC (ps) mC mU mG mG fA fU fC mG mA mG mA mA mC mA mU (ps) mA (ps) mA | 453 | 64 |
| EM1033 | EM1033-A | mU (ps) fU (ps) mG fC mC fA mA fG mG fA mA fA mA fU mC fA mC (ps) fC (ps) mA | 454 | 65 |
| EM1033 | EM1033-B | mU (ps) mG (ps) mG mU mG mA fU fU fU mU mC mC mU mU mG mG mC (ps) mA (ps) mA | 45! | 66 |
| EM1034 | EM1034-A | mC (ps) fA (ps) mC fA mG fG mU fU mC fA mG fG mC fC mA fC mU (ps) fU (ps) mC | 456 | 67 |
| EM1034 | EM1034-B | mG (ps) mA (ps) mA mG mU mG fG FC fC mU mG mA mA mC mC mU mG (ps) mU (ps) mG | 457 | 68 |
| EM1035 | EM1035-A | mC (ps) fA (ps) mG fC mA fC mA fA mA fG mC fA mU fG mU fU mA (ps) fG (ps) mC | 458 | 69 |
| EM1035 | EM1035-B | mG (ps) mC (ps) mU mA mA mC fA fU fG mC mU mU mU mG mU mG mC (ps) mU (ps) mG | 459 | 70 |
| EM1036 | EM1036-A | mC (ps) fA (ps) mC fA mU fC mG fA mA fG mG fA mC fU mC fC mA (ps) fC (ps) mA | 460 | 71 |
| EM1036 | EM1036-B | mU (ps) mG (ps) mU mG mG mA fG fU fC mC mU mU mC mG mA mU mG (ps) mU (ps) mG | 461 | 72 |
| EM1037 | EM1037-A | mU (ps) fU (ps) mG fU mG fU mA fG mA fC mU fC mC fA mU fA mC (ps) fU (ps) mG | 462 | 73 |
| EM1037 | EM1037-B | mC (ps) mA (ps) mG mU mA mU fG fG fA mG mU mC mU mA mC mA mC (ps) mA (ps) mA | 463 | 74 |
| EM1038 | EM1038-A | mC (ps) fA (ps) mC fA mA fU mU fC mA fU mG fG mA fA mC fC mC (ps) fC (ps) mA | 464 | 75 |
| EM1038 | EM1038-B | mU (ps) mG (ps) mG mG mG mU fU fC fC mA mU mG mA mA mU mU mG (ps) mU (ps) mG | 465 | 76 |
| EM1039 | EM1039-A | mU (ps) fC (ps) mC fA mC fA mA fA mC fA mG fG mC fU mC fA mC (ps) fA (ps) mG | 466 | 77 |
| EM1039 | EM1039-B | mC (ps) mU (ps) mG mU mG mA fG fC fC mU mG mU mU mU mG mU mG (ps) mG (ps) mA | 467 | 78 |
| EM1040 | EM1040-A | mA (ps) fC (ps) mA fG mG fU mU fC mA fG mG fC mC fA mC fU mU (ps) fC (ps) mG | 468 | 79 |
| EM1040 | EM1040-B | mC (ps) mG (ps) mA mA mG mU fG fG fC mC mU mG mA mA mC mC mU (ps) mG (ps) mU | 469 | 80 |
| EM1041 | EM1041-A | mC (ps) fU (ps) mG fU mA fC mU fG mA fA mU fC mA fC mA fG mC (ps) fU (ps) mU | 470 | 81 |
| EM1041 | EM1041-B | mA (ps) mA (ps) mG mC mU mG fU fG fA mU mU mC mA mG mU mA mC (ps) mA (ps) mG | 471 | 82 |
| EM1042 | EM1042-A | mG (ps) fU (ps) mC fU mC fC mA fC mA fU mC fG mA fA mG fG mA (ps) fC (ps) mU | 472 | 83 |
| EM1042 | EM1042-B | mA (ps) mG (ps) mU mC mC mU fU fC fG mA mU mG mU mG mG mA mG (ps) mA (ps) mC | 473 | 84 |
| EM1043 | EM1043-A | mU (ps) fC (ps) mG fU mC fC mA fG mA fA mU fC mC fA mU fC mA (ps) fG (ps) mC | 474 | 85 |
| EM1043 | EM1043-B | mG (ps) mC (ps) mU mG mA mU fG fG fA mU mU mC mU mG mG mA mC (ps) mG (ps) mA | 475 | 86 |
| EM1044 | EM1044-A | mC (ps) fC (ps) mC fA mA fG mA fU mC fC mA fU mC fU mU fU mC (ps) fU (ps) mG | 476 | 87 |
| EM1044 | EM1044-B | mC (ps) mA (ps) mG mA mA mA fG fA fU mG mG mA mU mC mU mU mG (ps) mG (ps) mG | 477 | 88 |
| EM1045 | EM1045-A | mA (ps) fA (ps) mG fU mG fG mG fU mG fA mA fG mU fA mG fA mG (ps) fG (ps) mC | 478 | 89 |
| EM1045 | EM1045-B | mG (ps) mC (ps) mC mU mC mU fA fC fU mU mC mA mC mC mC mA mC (ps) mU (ps) mU | 479 | 90 |
| EM1046 | EM1046-A | mC (ps) fA (ps) mU fU mA fG mA fU mU fU mC fU mA fG mC fA mA (ps) fG (ps) mA | 480 | 91 |
| EM1046 | EM1046-B | mU (ps) mC (ps) mU mU mG mC fU fA fG mA mA mA mU mC mU mA mA (ps) mU (ps) mG | 481 | 92 |
| EM1047 | EM1047-A | mC (ps) fU (ps) mC fC mA fC mA fU mC fG mA fA mG fG mA fC mU (ps) fC (ps) mC | 482 | 93 |
| EM1047 | EM1047-B | mG (ps) mG (ps) mA mG mU mC fC fU fU mC mG mA mU mG mU mG mG (ps) mA (ps) mG | 483 | 94 |
| EM1048 | EM1048-A | mC (ps) fA (ps) mG fC mU fG mU fA mC fU mG fA mA fU mC fA mC (ps) fA (ps) mG | 484 | 95 |
| EM1048 | EM1048-B | mC (ps) mU (ps) mG mU mG mA fU fU fC mA mG mU mA mC mA mG mC (ps) mU (ps) mG | 485 | 96 |
| EM1049 | EM1049-A | mC (ps) fA (ps) mU fG mA fG mC fA mG fC mU fG mU fU mA fG mG (ps) fA (ps) mC | 486 | 97 |
| EM1049 | EM1049-B | mG (ps) mU (ps) mC mC mU mA fA fC fA mG mC mU mG mC mU mC mA (ps) mU (ps) mG | 487 | 98 |
| EM1050 | EM1050-A | mG (ps) fU (ps) mC fU mG fU mU fU mG fA mA fU mC fU mU fG mA (ps) fG (ps) mA | 488 | 99 |
| EM1050 | EM1050-B | mU (ps) mC (ps) mU mC mA mA fG fA fU mU mC mA mA mA mC mA mG (ps) mA (ps) mC | 489 | 100 |
| EM1051 | EM1051-A | mC (ps) fC (ps) mU fU mU fG mG fA mG fC mU fC mG fU mC fC mA (ps) fG (ps) mA | 490 | 101 |
| EM1051 | EM1051-B | mU (ps) mC (ps) mU mG mG mA fC fG fA mG mC mU mC mC mA mA mA (ps) mG (ps) mG | 491 | 102 |
| EM1052 | EM1052-A | mG (ps) fC (ps) mU fG mU fU mA fG mG fA mC fC mC fA mG fU mU (ps) fG (ps) mU | 492 | 103 |
| EM1052 | EM1052-B | mA (ps) mC (ps) mA mA mC mU fG fG fG mU mC mC mU mA mA mC mA (ps) mG (ps) mC | 493 | 104 |
| EM1053 | EM1053-A | mG (ps) fG (ps) mU fA mG fA mU fC mA fU mC fA mG fG mA fG mG (ps) fG (ps) mC | 494 | 105 |
| EM1053 | EM1053-B | mG (ps) mC (ps) mC mC mU mC fC fU fG mA mU mG mA mU mC mU mA (ps) mC (ps) mC | 495 | 106 |
| EM1054 | EM1054-A | mG (ps) fG (ps) mG fU mA fG mA fU mC fA mU fC mA fG mG fA mG (ps) fG (ps) mG | 496 | 107 |
| EM1054 | EM1054-B | mC (ps) mC (ps) mC mU mC mC fU fG fA mU mG mA mU mC mU mA mC (ps) mC (ps) mC | 497 | 108 |
| EM1055 | EM1055-A | mU (ps) fG (ps) mG fC mU fU mG fC mA fC mA fG mG fU mG fA mA (ps) fA (ps) mC | 498 | 109 |
| EM1055 | EM1055-B | mG (ps) mU (ps) mU mU mC mA fC fC fU mG mU mG mC mA mA mG mC (ps) mC (ps) mA | 499 | 110 |
| EM1056 | EM1056-A | mC (ps) fU (ps) mA fU mU fC mC fU mC fC mC fA mC fA mA fA mC (ps) fC (ps) mA | 500 | 111 |
| EM1056 | EM1056-B | mU (ps) mG (ps) mG mU mU mU fG fU fG mG mG mA mG mG mA mA mU (ps) mA (ps) mG | 501 | 112 |
| EM1057 | EM1057-A | mG (ps) fA (ps) mG fU mA fG mU fC mG fG mA fG mC fG mG fA mA (ps) fG (ps) mG | 502 | 113 |
| EM1057 | EM1057-B | mC (ps) mC (ps) mU mU mC mC fG fC fU mC mC mG mA mC mU mA mC (ps) mU (ps) mC | 503 | 114 |
| EM1058 | EM1058-A | mG (ps) fA (ps) mU fC mC fA mG fG mG fA mA fU mA fU mA fG mU (ps) fU (ps) mA | 504 | 115 |
| EM1058 | EM1058-B | mU (ps) mA (ps) mA mC mU mA fU fA fU mU mC mC mC mU mG mG mA (ps) mU (ps) mC | 505 | 116 |
| EM1059 | EM1059-A | mA (ps) fU (ps) mU fA mG fA mU fU mU fC mU fA mG fC mA fA mG (ps) fA (ps) mA | 506 | 117 |
| EM1059 | EM1059-B | mU (ps) mU (ps) mC mU mU mG fC fU fA mG mA mA mA mU mC mU mA (ps) mA (ps) mU | 507 | 118 |
| EM1060 | EM1060-A | mG (ps) fU (ps) mU fA mG fG mA fC mC fC mA fG mU fU mG fU mC (ps) fA (ps) mU | 508 | 119 |
| EM1060 | EM1060-B | mA (ps) mU (ps) mG mA mC mA fA fC fU mG mG mG mU mC mC mU mA (ps) mA (ps) mC | 509 | 120 |
| EM1061 | EM1061-A | mA (ps) fU (ps) mC fC mA fG mG fG mA fA mU fA mU fA mG fU mU (ps) fA (ps) mA | 510 | 121 |
| EM1061 | EM1061-B | mU (ps) mU (ps) mA mA mC mU fA fU fA mU mU mC mC mC mU mG mG (ps) mA (ps) mU | 511 | 122 |
| EM1062 | EM1062-A | mA (ps) fA (ps) mG fU mC fC mA fG mA fA mU fG mA fC mA fC mU (ps) fG (ps) mA | 512 | 123 |
| EM1062 | EM1062-B | mU (ps) mC (ps) mA mG mU mG fU fC fA mU mU mC mU mG mG mA mC (ps) mU (ps) mU | 513 | 124 |
| EM1063 | EM1063-A | mA (ps) fC (ps) mA fU mU fU mU fU mG fA mU fG mG fU mC fA mA (ps) fC (ps) mA | 514 | 125 |
| EM1063 | EM1063-B | mU (ps) mG (ps) mU mU mG mA fC fC fA mU mC mA mA mA mA mA mU (ps) mG (ps) mU | 515 | 126 |
| EM1064 | EM1064-A | mG (ps) fA (ps) mG fC mU fC mG fU mC fC mA fG mA fA mU fC mC (ps) fA (ps) mU | 516 | 127 |
| EM1064 | EM1064-B | mA (ps) mU (ps) mG mG mA mU fU fC fU mG mG mA mC mG mA mG mC (ps) mU (ps) mC | 517 | 128 |
| EM1065 | EM1065-A | mG (ps) fU (ps) mG fU mA fG mA fA mG fG mU fC mU fC mU fU mC (ps) fA (ps) mC | 518 | 129 |
| EM1065 | EM1065-B | mG (ps) mU (ps) mG mA mA mG fA fG fA mC mC mU mU mC mU mA mC (ps) mA (ps) mC | 519 | 130 |
| EM1066 | EM1066-A | mC (ps) fA (ps) mC fU mA fU mU fC mC fU mC fC mC fA mC fA mA (ps) fA (ps) mC | 520 | 131 |
| EM1066 | EM1066-B | mG (ps) mU (ps) mU mU mG mU fG fG fG mA mG mG mA mA mU mA mG (ps) mU (ps) mG | 521 | 132 |
| EM1067 | EM1067-A | mA (ps) fC (ps) mA fC mU fA mU fU mC fC mU fC mC fC mA fC mA (ps) fA (ps) mA | 522 | 133 |
| EM1067 | EM1067-B | mU (ps) mU (ps) mU mG mU mG fG fG fA mG mG mA mA mU mA mG mU (ps) mG (ps) mU | 523 | 134 |
| EM1068 | EM1068-A | mU (ps) fG (ps) mU fA mC fU mG fA mA fU mC fA mC fA mG fC mU (ps) fU (ps) mU | 524 | 135 |
| EM1068 | EM1068-B | mA (ps) mA (ps) mA mG mC mU fG fU fG mA mU mU mC mA mG mU mA (ps) mC (ps) mA | 525 | 136 |
| EM1069 | EM1069-A | mA (ps) fA (ps) mC fC mC fC mA fG mG fA mC fA mC fU mA fU mU (ps) fC (ps) mC | 526 | 137 |
| EM1069 | EM1069-B | mG (ps) mG (ps) mA mA mU mA fG fU fG mU mC mC mU mG mG mG mG (ps) mU (ps) mU | 527 | 138 |
| EM1070 | EM1070-A | mC (ps) fU (ps) mU fU mG fG mA fG mC fU mC fG mU fC mC fA mG (ps) fA (ps) mA | 528 | 139 |
| EM1070 | EM1070-B | mU (ps) mU (ps) mC mU mG mG fA fC fG mA mG mC mU mC mC mA mA (ps) mA (ps) mG | 529 | 140 |
| EM1071 | EM1071-A | mU (ps) fA (ps) mG fU mG fG mA fU mC fU mU fC mC fA mG fC mC (ps) fU (ps) mG | 530 | 141 |
| EM1071 | EM1071-B | mC (ps) mA (ps) mG mG mC mU fG fG fA mA mG mA mU mC mC mA mC (ps) mU (ps) mA | 531 | 142 |
| EM1072 | EM1072-A | mG (ps) fA (ps) mC fA mC fU mA fU mU fC mC fU mC fC mC fA mC (ps) fA (ps) mA | 532 | 143 |
| EM1072 | EM1072-B | mU (ps) mU (ps) mG mU mG mG fG fA fG mG mA mA mU mA mG mU mG (ps) mU (ps) mC | 533 | 144 |
| EM1073 | EM1073-A | mA (ps) fC (ps) mA fU mU fA mG fA mU fU mU fC mU fA mG fC mA (ps) fA (ps) mG | 534 | 145 |
| EM1073 | EM1073-B | mC (ps) mU (ps) mU mG mC mU fA fG fA mA mA mU mC mU mA mA mU (ps) mG (ps) mU | 535 | 146 |
| EM1074 | EM1074-A | mU (ps) fC (ps) mU fC mG fU mU fG mG fA mG fU mA fG mU fC mG (ps) fG (ps) mA | 536 | 147 |
| EM1074 | EM1074-B | mU (ps) mC (ps) mC mG mA mC fU fA fC mU mC mC mA mA mC mG mA (ps) mG (ps) mA | 537 | 148 |
| EM1075 | EM1075-A | mC (ps) fA (ps) mC fA mG fC mU fG mU fA mC fU mG fA mA fU mC (ps) fA (ps) mC | 538 | 149 |
| EM1075 | EM1075-B | mG (ps) mU (ps) mG mA mU mU fC fA fG mU mA mC mA mG mC mU mG (ps) mU (ps) mG | 539 | 150 |
| EM1076 | EM1076-A | mU (ps) fG (ps) mU fC mU fG mU fU mU fG mA fA mU fC mU fU mG (ps) fA (ps) mG | 540 | 151 |
| EM1076 | EM1076-B | mC (ps) mU (ps) mC mA mA mG fA fU fU mC mA mA mA mC mA mG mA (ps) mC (ps) mA | 541 | 152 |
| EM1077 | EM1077-A | mA (ps) fC (ps) mU fG mA fA mU fC mA fC mA fG mC fU mU fU mG (ps) fU (ps) mA | 542 | 153 |
| EM1077 | EM1077-B | mU (ps) mA (ps) mC mA mA mA fG fC fU mG mU mG mA mU mU mC mA (ps) mG (ps) mU | 543 | 154 |
| EM1078 | EM1078-A | mG (ps) fU (ps) mC fC mA fG mA fA mU fC mC fA mU fC mA fG mC (ps) fC (ps) mU | 544 | 155 |
| EM1078 | EM1078-B | mA (ps) mG (ps) mG mC mU mG fA fU fG mG mA mU mU mC mU mG mG (ps) mA (ps) mC | 545 | 156 |
| EM1079 | EM1079-A | mA (ps) fC (ps) mU fU mG fC mC fA mA fG mG fA mA fA mA fU mC (ps) fA (ps) mC | 546 | 157 |
| EM1079 | EM1079-B | mG (ps) mU (ps) mG mA mU mU fU fU fC mC mU mU mG mG mC mA mA (ps) mG (ps) mU | 547 | 158 |
| EM1080 | EM1080-A | mU (ps) fC (ps) mA fC mA fG mC fU mG fU mA fC mU fG mA fA mU (ps) fC (ps) mA | 548 | 159 |
| EM1080 | EM1080-B | mU (ps) mG (ps) mA mU mU mC fA fG fU mA mC mA mG mC mU mG mU (ps) mG (ps) mA | 549 | 160 |
| EM1081 | EM1081-A | mA (ps) fG (ps) mC fU mC fG mU fC mC fA mG fA mA fU mC fC mA (ps) fU (ps) mC | 550 | 161 |
| EM1081 | EM1081-B | mG (ps) mA (ps) mU mG mG mA fU fU fC mU mG mG mA mC mG mA mG (ps) mC (ps) mU | 551 | 162 |
| EM1082 | EM1082-A | mA (ps) fU (ps) mC fU mU fC mC fA mG fC mC fU mG fU mG fU mG (ps) fG (ps) mU | 552 | 163 |
| EM1082 | EM1082-B | mA (ps) mC (ps) mC mA mC mA fC fA fG mG mC mU mG mG mA mA mG (ps) mA (ps) mU | 553 | 164 |
| EM1083 | EM1083-A | mU (ps) fG (ps) mG fA mG fU mA fG mU fC mG fG mA fG mC fG mG (ps) fA (ps) mA | 554 | 165 |
| EM1083 | EM1083-B | mU (ps) mU (ps) mC mC mG mC fU fC fC mG mA mC mU mA mC mU mC (ps) mC (ps) mA | 555 | 166 |
| EM1084 | EM1084-A | mC (ps) fU (ps) mC fG mA fU mC fC mA fG mG fG mA fA mU fA mU (ps) fA (ps) mG | 556 | 167 |
| EM1084 | EM1084-B | mC (ps) mU (ps) mA mU mA mU fU fC fC mC mU mG mG mA mU mC mG (ps) mA (ps) mG | 557 | 168 |
| EM1085 | EM1085-A | mU (ps) fA (ps) mC fU mG fA mA fU mC fA mC fA mG fC mU fU mU (ps) fG (ps) mU | 558 | 169 |
| EM1085 | EM1085-B | mA (ps) mC (ps) mA mA mA mG fC fU fG mU mG mA mU mU mC mA mG (ps) mU (ps) mA | 559 | 170 |
| EM1086 | EM1086-A | mU (ps) fC (ps) mC fA mG fA mA fU mC fC mA fU mC fA mG fC mC (ps) fU (ps) mC | 560 | 171 |
| EM1086 | EM1086-B | mG (ps) mA (ps) mG mG mC mU fG fA fU mG mG mA mU mU mC mU mG (ps) mG (ps) mA | 561 | 172 |
| EM1087 | EM1087-A | mA (ps) fA (ps) mG fG mA fU mU fC mA fG mC fU mU fC mU fU mU (ps) fU (ps) mC | 562 | 173 |
| EM1087 | EM1087-B | mG (ps) mA (ps) mA mA mA mG fA fA fG mC mU mG mA mA mU mC mC (ps) mU (ps) mU | 563 | 174 |
| EM1088 | EM1088-A | mU (ps) fG (ps) mA fA mU fC mA fC mA fG mC fU mU fU mG fU mA (ps) fG (ps) mG | 564 | 175 |
| EM1088 | EM1088-B | mC (ps) mC (ps) mU mA mC mA fA fA fG mC mU mG mU mG mA mU mU (ps) mC (ps) mA | 565 | 176 |
| EM1089 | EM1089-A | mG (ps) fU (ps) mG fG mG fU mG fA mA fG mU fA mG fA mG fG mC (ps) fG (ps) mC | 566 | 177 |
| EM1089 | EM1089-B | mG (ps) mC (ps) mG mC mC mU fC fU fA mC mU mU mC mA mC mC mC (ps) mA (ps) mC | 567 | 178 |
| EM1090 | EM1090-A | mC (ps) fC (ps) mA fG mA fA mU fC mC fA mU fC mA fG mC fC mU (ps) fC (ps) mA | 568 | 179 |
| EM1090 | EM1090-B | mU (ps) mG (ps) mA mG mG mC fU fG fA mU mG mG mA mU mU mC mU (ps) mG (ps) mG | 569 | 180 |
| EM1091 | EM1091-A | mC (ps) fA (ps) mU fU mG fU mG fU mA fG mA fA mG fG mU fC mU (ps) fC (ps) mU | 570 | 181 |
| EM1091 | EM1091-B | mA (ps) mG (ps) mA mG mA mC fC fU fU mC mU mA mC mA mC mA mA (ps) mU (ps) mG | 571 | 182 |
| EM1092 | EM1092-A | mU (ps) fU (ps) mU fG mG fC mU fU mG fC mA fC mA fG mG fU mG (ps) fA (ps) mA | 572 | 183 |
| EM1092 | EM1092-B | mU (ps) mU (ps) mC mA mC mC fU fG fU mG mC mA mA mG mC mC mA (ps) mA (ps) mA | 573 | 184 |
| EM1093 | EM1093-A | mC (ps) fA (ps) mA fU mU fC mA fU mG fG mA fA mC fC mC fC mA (ps) fG (ps) mG | 574 | 185 |
| EM1093 | EM1093-B | mC (ps) mC (ps) mU mG mG mG fG fU fU mC mC mA mU mG mA mA mU (ps) mU (ps) mG | 575 | 186 |
| EM1094 | EM1094-A | mC (ps) fU (ps) mU fC mA fC mA fG mC fU mG fU mA fC mU fG mA (ps) fA (ps) mU | 576 | 187 |
| EM1094 | EM1094-B | mA (ps) mU (ps) mU mC mA mG fU fA fC mA mG mC mU mG mU mG mA (ps) mA (ps) mG | 577 | 188 |
| EM1095 | EM1095-A | mG (ps) fC (ps) mU fG mC fA mU fA mG fA mA fG mG fC mC fU mC (ps) fG (ps) mA | 578 | 189 |
| EM1095 | EM1095-B | mU (ps) mC (ps) mG mA mG mG fC fC fU mU mC mU mA mU mG mC mA (ps) mG (ps) mC | 579 | 190 |
| EM1096 | EM1096-A | mG (ps) fA (ps) mA fU mC fC mA fU mC fA mG fC mC fU mC fA mC (ps) fA (ps) mC | 580 | 191 |
| EM1096 | EM1096-B | mG (ps) mU (ps) mG mU mG mA fG fG fC mU mG mA mU mG mG mA mU (ps) mU (ps) mC | 581 | 192 |
| EM1097 | EM1097-A | mA (ps) fA (ps) mU fC mC fA mU fC mA fG mC fC mU fC mA fC mA (ps) fC (ps) mA | 582 | 193 |
| EM1097 | EM1097-B | mU (ps) mG (ps) mU mG mU mG fA fG fG mC mU mG mA mU mG mG mA (ps) mU (ps) mU | 583 | 194 |
| EM1098 | EM1098-A | mA (ps) fG (ps) mU fG mG fG mU fG mA fA mG fU mA fG mA fG mG (ps) fC (ps) mG | 584 | 195 |
| EM1098 | EM1098-B | mC (ps) mG (ps) mC mC mU mC fU fA fC mU mU mC mA mC mC mC mA (ps) mC (ps) mU | 585 | 196 |
| EM1099 | EM1099-A | mC (ps) fU (ps) mC fG mU fC mC fA mG fA mA fU mC fC mA fU mC (ps) fA (ps) mG | 586 | 197 |
| EM1099 | EM1099-B | mC (ps) mU (ps) mG mA mU mG fG fA fU mU mC mU mG mG mA mC mG (ps) mA (ps) mG | 587 | 198 |
| EM1100 | EM1100-A | mU (ps) fU (ps) mG fG mA fG mU fA mG fU mC fG mG fA mG fC mG (ps) fG (ps) mA | 588 | 199 |
| EM1100 | EM1100-B | mU (ps) mC (ps) mC mG mC mU fC fC fG mA mC mU mA mC mU mC mC (ps) mA (ps) mA | 589 | 200 |
| EM1101 | EM1101-A | mA (ps) fC (ps) mA fA mU fU mC fA mU fG mG fA mA fC mC fC mC (ps) fA (ps) mG | 590 | 201 |
| EM1101 | EM1101-B | mC (ps) mU (ps) mG mG mG mG fU fU fC mC mA mU mG mA mA mU mU (ps) mG (ps) mU | 591 | 202 |
| EM1102 | EM1102-A | mG (ps) fG (ps) mU fC mU fC mU fU mC fA mC fA mG fC mU fG mU (ps) fA (ps) mC | 592 | 203 |
| EM1102 | EM1102-B | mG (ps) mU (ps) mA mC mA mG fC fU fG mU mG mA mA mG mA mG mA (ps) mC (ps) mC | 593 | 204 |
| EM1103 | EM1103-A | mA (ps) fC (ps) mA fG mC fU mG fU mA fC mU fG mA fA mU fC mA (ps) fC (ps) mA | 594 | 205 |
| EM1103 | EM1103-B | mU (ps) mG (ps) mU mG mA mU fU fC fA mG mU mA mC mA mG mC mU (ps) mG (ps) mU | 595 | 206 |
| EM1104 | EM1104-A | mC (ps) fG (ps) mA fU mC fC mA fG mG fG mA fA mU fA mU fA mG (ps) fU (ps) mU | 596 | 207 |
| EM1104 | EM1104-B | mA (ps) mA (ps) mC mU mA mU fA fU fU mC mC mC mU mG mG mA mU (ps) mC (ps) mG | 597 | 208 |
| EM1105 | EM1105-A | mC (ps) fU (ps) mC fC mU fU mU fG mG fA mG fC mU fC mG fU mC (ps) fC (ps) mA | 598 | 209 |
| EM1105 | EM1105-B | mU (ps) mG (ps) mG mA mC mG fA fG fC mU mC mC mA mA mA mG mG (ps) mA (ps) mG | 599 | 210 |
| EM1106 | EM1106-A | mU (ps) fA (ps) mG fA mU fC mA fU mC fA mG fG mA fG mG fG mC (ps) fC (ps) mA | 600 | 211 |
| EM1106 | EM1106-B | mU (ps) mG (ps) mG mC mC mC fU fC fC mU mG mA mU mG mA mU mC (ps) mU (ps) mA | 601 | 212 |
| EM1107 | EM1107-A | mC (ps) fC (ps) mA fC mA fA mU fU mC fA mU fG mG fA mA fC mC (ps) fC (ps) mC | 602 | 213 |
| EM1107 | EM1107-B | mG (ps) mG (ps) mG mG mU mU fC fC fA mU mG mA mA mU mU mG mU (ps) mG (ps) mG | 603 | 214 |
| EM1108 | EM1108-A | mC (ps) fA (ps) mU fA mG fA mA fG mG fC mC fU mC fG mA fA mC (ps) fC (ps) mC | 604 | 215 |
| EM1108 | EM1108-B | mG (ps) mG (ps) mG mU mU mC fG fA fG mG mC mC mU mU mC mU mA (ps) mU (ps) mG | 605 | 216 |
| EM1109 | EM1109-A | mU (ps) fU (ps) mG fG mA fG mC fU mC fG mU fC mC fA mG fA mA (ps) fU (ps) mC | 606 | 217 |
| EM1109 | EM1109-B | mG (ps) mA (ps) mU mU mC mU fG fG fA mC mG mA mG mC mU mC mC (ps) mA (ps) mA | 607 | 218 |
| EM1110 | EM1110-A | mU (ps) fU (ps) mC fU mC fG mU fU mG fG mA fG mU fA mG fU mC (ps) fG (ps) mG | 608 | 219 |
| EM1110 | EM1110-B | mC (ps) mC (ps) mG mA mC mU fA fC fU mC mC mA mA mC mG mA mG (ps) mA (ps) mA | 609 | 220 |
| EM1111 | EM1111-A | mA (ps) fU (ps) mG fU mU fC mU fC mG fA mU fC mC fA mG fG mG (ps) fA (ps) mA | 610 | 221 |
| EM1111 | EM1111-B | mU (ps) mU (ps) mC mC mC mU fG fG fA mU mC mG mA mG mA mA mC (ps) mA (ps) mU | 611 | 222 |
| EM1112 | EM1112-A | mA (ps) fG (ps) mG fU mG fC mG fC mU fU mG fU mU fA mC fG mG (ps) fU (ps) mG | 612 | 223 |
| EM1112 | EM1112-B | mC (ps) mA (ps) mC mC mG mU fA fA fC mA mA mG mC mG mC mA mC (ps) mC (ps) mU | 613 | 224 |
| EM1113 | EM1113-A | mC (ps) fC (ps) mU fC mC fA mU fA mU fA mU fA mC fG mC fC mC (ps) fU (ps) mC | 614 | 225 |
| EM1113 | EM1113-B | mG (ps) mA (ps) mG mG mG mC fG fU fA mU mA mU mA mU mG mG mA (ps) mG (ps) mG | 615 | 226 |
| EM1114 | EM1114-A | mU (ps) fG (ps) mC fU mA fU mG fU mC fA mU fU mG fU mC fA mA (ps) fA (ps) mG | 616 | 227 |
| EM1114 | EM1114-B | mC (ps) mU (ps) mU mU mG mA fC fA fA mU mG mA mC mA mU mA mG (ps) mC (ps) mA | 617 | 228 |
| EM1115 | EM1115-A | mA (ps) fA (ps) mA fA mU fC mA fC mC fA mG fG mU fU mU fU mG (ps) fC (ps) mC | 618 | 229 |
| EM1115 | EM1115-B | mG (ps) mG (ps) mC mA mA mA fA fC fC mU mG mG mU mG mA mU mU (ps) mU (ps) mU | 619 | 230 |
| EM1116 | EM1116-A | mC (ps) fU (ps) mC fA mU fA mA fA mG fG mA fU mU fC mA fG mC (ps) fU (ps) mU | 620 | 231 |
| EM1116 | EM1116-B | mA (ps) mA (ps) mG mC mU mG fA fA fU mC mC mU mU mU mA mU mG (ps) mA (ps) mG | 621 | 232 |
| EM1117 | EM1117-A | mU (ps) fU (ps) mC fA mU fA mU fG mC fA mG fC mA fG mU fA mC (ps) fA (ps) mU | 622 | 233 |
| EM1117 | EM1117-B | mA (ps) mU (ps) mG mU mA mC fU fG fC mU mG mC mA mU mA mU mG (ps) mA (ps) mA | 623 | 234 |
| EM1118 | EM1118-A | mU (ps) fU (ps) mG fA mC fG mA fA mG fU mC fG mU fA mC fU mC (ps) fG (ps) mC | 624 | 235 |
| EM1118 | EM1118-B | mG (ps) mC (ps) mG mA mG mU fA fC fG mA mC mU mU mC mG mU mC (ps) mA (ps) mA | 625 | 236 |
| EM1119 | EM1119-A | mU (ps) fA (ps) mG fU mC fG mG fA mG fC mG fG mA fA mG fG mU (ps) fA (ps) mA | 626 | 237 |
| EM1119 | EM1119-B | mU (ps) mU (ps) mA mC mC mU fU fC fC mG mC mU mC mC mG mA mC (ps) mU (ps) mA | 627 | 238 |
| EM1120 | EM1120-A | mU (ps) fG (ps) mA fU mA fG mU fC mC fA mC fA mA fA mC fA mG (ps) fG (ps) mC | 628 | 239 |
| EM1120 | EM1120-B | mG (ps) mC (ps) mC mU mG mU fU fU fG mU mG mG mA mC mU mA mU (ps) mC (ps) mA | 629 | 240 |
| EM1121 | EM1121-A | mG (ps) fU (ps) mC fU mU fC mA fC mA fG mG fC mA fU mU fU mC (ps) fU (ps) mA | 630 | 241 |
| EM1121 | EM1121-B | mU (ps) mA (ps) mG mA mA mA fU fG fC mC mU mG mU mG mA mA mG (ps) mA (ps) mC | 631 | 242 |
| EM1122 | EM1122-A | mU (ps) fG (ps) mA fA mU fC mU fU mG fA mG fA mA fA mG fU mC (ps) fG (ps) mU | 632 | 243 |
| EM1122 | EM1122-B | mA (ps) mC (ps) mG mA mC mU fU fU fC mU mC mA mA mG mA mU mU (ps) mC (ps) mA | 633 | 244 |
| EM1123 | EM1123-A | mU (ps) fC (ps) mG fG mA fG mC fG mG fA mA fG mG fU mA fA mU (ps) fG (ps) mU | 634 | 245 |
| EM1123 | EM1123-B | mA (ps) mC (ps) mA mU mU mA fC fC fU mU mC mC mG mC mU mC mC (ps) mG (ps) mA | 635 | 246 |
| EM1124 | EM1124-A | mC (ps) fA (ps) mC fC mU fG mG fA mG fU mC fU mG fU mU fU mU (ps) fU (ps) mU | 636 | 247 |
| EM1124 | EM1124-B | mA (ps) mA (ps) mA mA mA mA fC fA fG mA mC mU mC mC mA mG mG (ps) mU (ps) mG | 637 | 248 |
| EM1125 | EM1125-A | mU (ps) fU (ps) mA fU mU fC mA fA mU fU mU fA mA fU mC fA mG (ps) fU (ps) mG | 638 | 249 |
| EM1125 | EM1125-B | mC (ps) mA (ps) mC mU mG mA fU fU fA mA mA mU mU mG mA mA mU (ps) mA (ps) mA | 639 | 250 |
| EM1126 | EM1126-A | mA (ps) fA (ps) mA fG mG fA mU fU mC fA mG fC mU fU mC fU mU (ps) fU (ps) mU | 640 | 251 |
| EM1126 | EM1126-B | mA (ps) mA (ps) mA mA mG mA fA fG fC mU mG mA mA mU mC mC mU (ps) mU (ps) mU | 641 | 252 |
| EM1127 | EM1127-A | mG (ps) fU (ps) mA fG mU fC mG fG mA fG mC fG mG fA mA fG mG (ps) fU (ps) mA | 642 | 253 |
| EM1127 | EM1127-B | mU (ps) mA (ps) mC mC mU mU fC fC fG mC mU mC mC mG mA mC mU (ps) mA (ps) mC | 643 | 254 |
| EM1128 | EM1128-A | mA (ps) fG (ps) mU fC mG fG mA fG mC fG mG fA mA fG mG fU mA (ps) fA (ps) mU | 644 | 255 |
| EM1128 | EM1128-B | mA (ps) mU (ps) mU mA mC mC fU fU fC mC mG mC mU mC mC mG mA (ps) mC (ps) mU | 645 | 256 |
| EM1129 | EM1129-A | mC (ps) fA (ps) mU fA mU fA mA fA mA fG mU fG mC fA mC fC mU (ps) fG (ps) mC | 646 | 257 |
| EM1129 | EM1129-B | mG (ps) mC (ps) mA mG mG mU fG fC fA mC mU mU mU mU mA mU mA (ps) mU (ps) mG | 647 | 258 |
| EM1130 | EM1130-A | mC (ps) fA (ps) mU fA mU fA mU fA mC fG mC fC mC fU mC fC mU (ps) fG (ps) mU | 648 | 259 |
| EM1130 | EM1130-B | mA (ps) mC (ps) mA mG mG mA fG fG fG mC mG mU mA mU mA mU mA (ps) mU (ps) mG | 649 | 260 |
| EM1131 | EM1131-A | mU (ps) fC (ps) mC fA mU fA mU fA mU fA mC fG mC fC mC fU mC (ps) fC (ps) mU | 650 | 261 |
| EM1131 | EM1131-B | mA (ps) mG (ps) mG mA mG mG fG fC fG mU mA mU mA mU mA mU mG (ps) mG (ps) mA | 651 | 262 |
| EM1132 | EM1132-A | mU (ps) fA (ps) mU fU mG fA mU fU mA fC mA fA mC fU mU fU mG (ps) fU (ps) mu | 652 | 263 |
| EM1132 | EM1132-B | mA (ps) mA (ps) mC mA mA mA fG fU fU mG mU mA mA mU mC mA mA (ps) mU (ps) mA | 653 | 264 |
| EM1133 | EM1133-A | mU (ps) fA (ps) mC fA mA fC mU fU mU fG mU fU mA fU mU fC mA (ps) fA (ps) mU | 654 | 265 |
| EM1133 | EM1133-B | mA (ps) mU (ps) mU mG mA mA fU fA fA mC mA mA mA mG mU mU mG (ps) mU (ps) mA | 655 | 266 |
| EM1134 | EM1134-A | mU (ps) fU (ps) mG fC mC fU mU fU mU fG mC fC mC fU mC fC mA (ps) fU (ps) mA | 656 | 267 |
| EM1134 | EM1134-B | mU (ps) mA (ps) mU mG mG mA fG fG fG mC mA mA mA mA mG mG mC (ps) mA (ps) mA | 657 | 268 |
| EM1135 | EM1135-A | mU (ps) fA (ps) mA fU mA fU mC fA mG fG mA fC mU fU mG fC mC (ps) fA (ps) mA | 658 | 269 |
| EM1135 | EM1135-B | mU (ps) mU (ps) mG mG mC mA fA fG fU mC mC mU mG mA mU mA mU (ps) mU (ps) mA | 659 | 270 |
| EM1136 | EM1136-A | mU (ps) fC (ps) mG fU mA fG mG fG mA fC mA fC mA fG mG fG mU (ps) fU (ps) mU | 660 | 271 |
| EM1136 | EM1136-B | mA (ps) mA (ps) mA mC mC mC fU fG fU mG mU mC mC mC mU mA mC (ps) mG (ps) mA | 661 | 272 |
| EM1137 | EM1137-A | mU (ps) fC (ps) mG fU mC fA mA fU mG fU mC fC mU fC mG fG mC (ps) fU (ps) mG | 662 | 273 |
| EM1137 | EM1137-B | mC (ps) mA (ps) mG mC mC mG fA fG fG mA mC mA mU mU mG mA mC (ps) mG (ps) mA | 663 | 274 |
| EM1138 | EM1138-A | mC (ps) fC (ps) mC fU mC fC mA fU mA fU mA fU mA fC mG fC mC (ps) fC (ps) mU | 664 | 275 |
| EM1138 | EM1138-B | mA (ps) mG (ps) mG mG mC mG fU fA fU mA mU mA mU mG mG mA mG (ps) mG (ps) mG | 665 | 276 |
| EM1139 | EM1139-A | mU (ps) fC (ps) mC fA mG fA mA fU mG fA mC fA mC fU mG fA mA (ps) fC (ps) mC | 666 | 277 |
| EM1139 | EM1139-B | mG (ps) mG (ps) mU mU mC mA fG fU fG mU mC mA mU mU mC mU mG (ps) mG (ps) mA | 667 | 278 |
| EM1140 | EM1140-A | mA (ps) fA (ps) mA fG mC fC mA fG mC fA mU fC mA fU mG fA mG (ps) fU (ps) mA | 668 | 279 |
| EM1140 | EM1140-B | mU (ps) mA (ps) mC mU mC mA fU fG fA mU mG mC mU mG mG mC mU (ps) mU (ps) mU | 669 | 280 |
| EM1141 | EM1141-A | mA (ps) fU (ps) mA fU mA fC mG fC mC fC mU fC mC fU mG fU mU (ps) fG (ps) mU | 670 | 281 |
| EM1141 | EM1141-B | mA (ps) mC (ps) mA mA mC mA fG fG fA mG mG mG mC mG mU mA mU (ps) mA (ps) mU | 671 | 282 |
| EM1142 | EM1142-A | mU (ps) fA (ps) mU fG mU fC mA fU mU fG mU fC mA fA mA fG mC (ps) fC (ps) mA | 672 | 283 |
| EM1142 | EM1142-B | mU (ps) mG (ps) mG mC mU mU fU fG fA mC mA mA mU mG mA mC mA (ps) mU (ps) mA | 673 | 284 |
| EM1143 | EM1143-A | mA (ps) fU (ps) mA fC mU fC mC fC mC fU mG fG mA fA mA fG mC (ps) fC (ps) mG | 674 | 285 |
| EM1143 | EM1143-B | mC (ps) mG (ps) mG mC mU mU fU fC fC mA mG mG mG mG mA mG mU (ps) mA (ps) mU | 675 | 286 |
| EM1144 | EM1144-A | mA (ps) fU (ps) mC fA mU fG mA fG mU fA mU fA mA fC mC fU mU (ps) fC (ps) mA | 676 | 287 |
| EM1144 | EM1144-B | mU (ps) mG (ps) mA mA mG mG fU fU fA mU mA mC mU mC mA mU mG (ps) mA (ps) mU | 677 | 288 |
| EM1145 | EM1145-A | mU (ps) fG (ps) mG fC mA fG mA fC mA fA mA fU mA fG mG fC mG (ps) fU (ps) mG | 678 | 289 |
| EM1145 | EM1145-B | mC (ps) mA (ps) mC mG mC mC fU fA fU mU mU mG mU mC mU mG mC (ps) mC (ps) mA | 679 | 290 |
| EM1146 | EM1146-A | mU (ps) fC (ps) mU fU mU fC mA fG mG fA mU fG mU fA mU fU mU (ps) fG (ps) mG | 680 | 291 |
| EM1146 | EM1146-B | mC (ps) mC (ps) mA mA mA mU fA fC fA mU mC mC mU mG mA mA mA (ps) mG (ps) mA | 681 | 292 |
| EM1147 | EM1147-A | mU (ps) fU (ps) mG fA mA fU mC fU mU fG mA fG mA fA mA fG mU (ps) fC (ps) mG | 682 | 293 |
| EM1147 | EM1147-B | mC (ps) mG (ps) mA mC mU mU fU fC fU mC mA mA mG mA mU mU mC (ps) mA (ps) mA | 683 | 294 |
| EM1148 | EM1148-A | mC (ps) fU (ps) mU fG mC fC mC fC mC fA mC fU mU fU mC fU mA (ps) fA (ps) mG | 684 | 295 |
| EM1148 | EM1148-B | mC (ps) mU (ps) mU mA mG mA fA fA fG mU mG mG mG mG mG mC mA (ps) mA (ps) mG | 685 | 296 |
| EM1149 | EM1149-A | mA (ps) fG (ps) mU fU mC fC mA fA mU fG mU fC mA fU mC fU mG (ps) fU (ps) mC | 686 | 297 |
| EM1149 | EM1149-B | mG (ps) mA (ps) mC mA mG mA fU fG fA mC mA mU mU mG mG mA mA (ps) mC (ps) mU | 687 | 298 |
| EM1150 | EM1150-A | mC (ps) fU (ps) mU fG mA fG mA fA mA fG mU fC mG fU mA fG mG (ps) fG (ps) mA | 688 | 299 |
| EM1150 | EM1150-B | mU (ps) mC (ps) mC mC mU mA fC fG fA mC mU mU mU mC mU mC mA (ps) mA (ps) mG | 689 | 300 |
| EM1151 | EM1151-A | mU (ps) fU (ps) mU fC mA fU mU fG mU fG mU fA mG fA mA fG mG (ps) fU (ps) mC | 690 | 301 |
| EM1151 | EM1151-B | mG (ps) mA (ps) mC mC mU mu fc fU fA mC mA mC mA mA mU mG mA (ps) mA (ps) mA | 691 | 302 |
| EM1152 | EM1152-A | mG (ps) fC (ps) mC fA mG fU mA fU mG fA mA fA mA fG mA fG mA (ps) fC (ps) mU | 692 | 303 |
| EM1152 | EM1152-B | mA (ps) mG (ps) mU mC mU mC fU fU fU mU mC mA mU mA mC mU mG (ps) mG (ps) mC | 693 | 304 |
| EM1153 | EM1153-A | mA (ps) fG (ps) mC fU mU fG mA fC mG fA mA fG mU fC mG fU mA (ps) fC (ps) mU | 694 | 305 |
| EM1153 | EM1153-B | mA (ps) mG (ps) mU mA mC mG fA fC fU mU mC mG mU mC mA mA mG (ps) mC (ps) mU | 695 | 306 |
| EM1154 | EM1154-A | mC (ps) fA (ps) mG fG mU fG mC fG mC fU mU fG mU fU mA fC mG (ps) fG (ps) mU | 696 | 307 |
| EM1154 | EM1154-B | mA (ps) mC (ps) mC mG mU mA fA fC fA mA mG mC mG mC mA mC mC (ps) mU (ps) mG | 697 | 308 |
| EM1155 | EM1155-A | mG (ps) fA (ps) mC fG mA fA mG fU mC fG mU fA mC fU mC fG mC (ps) fA (ps) mG | 698 | 309 |
| EM1155 | EM1155-B | mC (ps) mU (ps) mG mC mG mA fG fU fA mC mG mA mC mU mU mC mG (ps) mU (ps) mC | 699 | 310 |
| EM1156 | EM1156-A | mA (ps) fG (ps) mG fU mA fA mU fG mU fC mC fA mG fG mC fU mG (ps) fG (ps) mA | 700 | 311 |
| EM1156 | EM1156-B | mU (ps) mC (ps) mC mA mG mC fC fU fG mG mA mC mA mU mU mA mC (ps) mC (ps) mU | 701 | 312 |
| EM1157 | EM1157-A | mU (ps) fG (ps) mA fC mG fA mA fG mU fC mG fU mA fC mU fC mG (ps) fC (ps) mA | 702 | 313 |
| EM1157 | EM1157-B | mU (ps) mG (ps) mC mG mA mG fU fA fC mG mA mC mU mU mC mG mU (ps) mC (ps) mA | 703 | 314 |
| EM1158 | EM1158-A | mC (ps) fU (ps) mG fU mG fC mU fC mG fU mG fU mA fG mU fG mG (ps) fA (ps) mU | 704 | 315 |
| EM1158 | EM1158-B | mA (ps) mU (ps) mC mC mA mC fU fA fC mA mC mG mA mG mC mA mC (ps) mA (ps) mG | 705 | 316 |
| EM1159 | EM1159-A | mU (ps) fC (ps) mA fU mA fA mA fG mG fA mU fU mC fA mG fC mU (ps) fU (ps) mC | 706 | 317 |
| EM1159 | EM1159-B | mG (ps) mA (ps) mA mG mC mU fG fA fA mU mC mC mU mU mU mA mU (ps) mG (ps) mA | 707 | 318 |
| EM1160 | EM1160-A | mA (ps) fC (ps) mA fU mA fC mA fU mU fA mG fA mU fU mU fC mU (ps) fA (ps) mG | 708 | 319 |
| EM1160 | EM1160-B | mC (ps) mU (ps) mA mG mA mA fA fU fC mU mA mA mU mG mU mA mU (ps) mG (ps) mU | 709 | 320 |
| EM1161 | EM1161-A | mC (ps) fA (ps) mU fA mC fA mU fU mA fG mA fU mU fU mC fU mA (ps) fG (ps) mC | 710 | 321 |
| EM1161 | EM1161-B | mG (ps) mC (ps) mU mA mG mA fA fA fU mC mU mA mA mU mG mU mA (ps) mU (ps) mG | 711 | 322 |
| EM1162 | EM1162-A | mA (ps) fG (ps) mC fA mU fC mA fU mG fA mG fU mA fU mA fA mC (ps) fC (ps) mU | 712 | 323 |
| EM1162 | EM1162-B | mA (ps) mG (ps) mG mU mU mA fU fA fC mU mC mA mU mG mA mU mG (ps) mC (ps) mU | 713 | 324 |
| EM1163 | EM1163-A | mC (ps) fU (ps) mU fC mA fU mG fU mA fU mA fA mA fA mA fC mA (ps) fG (ps) mC | 714 | 325 |
| EM1163 | EM1163-B | mG (ps) mC (ps) mU mG mU mU fU fU fU mA mU mA mC mA mU mG mA (ps) mA (ps) mG | 715 | 326 |
| EM1164 | EM1164-A | mA (ps) fG (ps) mA fC mA fA mA fU mA fG mG fC mG fU mG fA mU (ps) fG (ps) mU | 716 | 327 |
| EM1164 | EM1164-B | mA (ps) mC (ps) mA mU mC mA fC fG fC mC mU mA mU mU mU mG mU (ps) mC (ps) mU | 717 | 328 |
| EM1165 | EM1165-A | mA (ps) fC (ps) mA fA mA fU mA fG mG fC mG fU mG fA mU fG mU (ps) fU (ps) mG | 718 | 329 |
| EM1165 | EM1165-B | mC (ps) mA (ps) mA mC mA mU fC fA fC mG mC mC mU mA mU mU mU (ps) mG (ps) mU | 719 | 330 |
| EM1166 | EM1166-A | mA (ps) fU (ps) mU fG mA fU mU fA mC fA mA fC mU fU mU fG mU (ps) fU (ps) mA | 720 | 331 |
| EM1166 | EM1166-B | mU (ps) mA (ps) mA mC mA mA fA fG fU mU mG mU mA mA mU mC mA (ps) mA (ps) mU | 721 | 332 |
| EM1167 | EM1167-A | mU (ps) fG (ps) mU fC mA fU mC fU mG fU mC fC mU fC mA fU mA (ps) fA (ps) mA | 722 | 333 |
| EM1167 | EM1167-B | mU (ps) mU (ps) mU mA mU mG fA fG fG mA mC mA mG mA mU mG mA (ps) mC (ps) mA | 723 | 334 |
| EM1168 | EM1168-A | mA (ps) fU (ps) mG fA mG fU mA fU mA fA mC fC mU fU mC fA mU (ps) fG (ps) mU | 724 | 335 |
| EM1168 | EM1168-B | mA (ps) mC (ps) mA mU mG mA fA fG fG mU mU mA mU mA mC mU mC (ps) mA (ps) mU | 725 | 336 |
| EM1169 | EM1169-A | mC (ps) fU (ps) mC fG mU fC mA fA mU fG mU fC mC fU mC fG mG (ps) fC (ps) mU | 726 | 337 |
| EM1169 | EM1169-B | mA (ps) mG (ps) mC mC mG mA fG fG fA mC mA mU mU mG mA mC mG (ps) mA (ps) mG | 727 | 338 |
| EM1170 | EM1170-A | mC (ps) fU (ps) mU fG mA fC mG fA mA fG mU fC mG fU mA fC mU (ps) fC (ps) mG | 728 | 339 |
| EM1170 | EM1170-B | mC (ps) mG (ps) mA mG mU mA fC fG fA mC mU mU mC mG mU mC mA (ps) mA (ps) mG | 729 | 340 |
| EM1171 | EM1171-A | mU (ps) fU (ps) mA fA mU fC mC fC mC fA mU fC mC fA mG fA mU (ps) fG (ps) mC | 730 | 341 |
| EM1171 | EM1171-B | mG (ps) mC (ps) mA mU mC mU fG fG fA mU mG mG mG mG mA mU mU (ps) mA (ps) mA | 731 | 342 |
| EM1172 | EM1172-A | mG (ps) fU (ps) mA fC mU fC mG fC mA fG mA fG mG fU mG fG mG (ps) fA (ps) mG | 732 | 343 |
| EM1172 | EM1172-B | mC (ps) mU (ps) mC mC mC mA fC fC fU mC mU mG mC mG mA mG mU (ps) mA (ps) mC | 733 | 344 |
| EM1173 | EM1173-A | mA (ps) fU (ps) mA fG mA fA mG fG mC fC mU fC mG fA mA fC mC (ps) fC (ps) mC | 734 | 345 |
| EM1173 | EM1173-B | mG (ps) mG (ps) mG mG mU mU fC fG fA mG mG mC mC mU mU mC mU (ps) mA (ps) mU | 735 | 346 |
| EM1174 | EM1174-A | mA (ps) fU (ps) mU fU mA fA mU fC mA fG mU fG mC fU mA fU mG (ps) fU (ps) mC | 736 | 347 |
| EM1174 | EM1174-B | mG (ps) mA (ps) mC mA mU mA fG fC fA mC mU mG mA mU mU mA mA (ps) mA (ps) mU | 737 | 348 |
| EM1175 | EM1175-A | mA (ps) fU (ps) mG fU mC fA mU fC mU fG mU fC mC fU mC fA mU (ps) fA (ps) mA | 738 | 349 |
| EM1175 | EM1175-B | mU (ps) mU (ps) mA mU mG mA fG fG fA mC mA mG mA mU mG mA mC (ps) mA (ps) mU | 739 | 350 |
| EM1176 | EM1176-A | mA (ps) fG (ps) mU fA mU fG mA fA mA fA mG fA mG fA mC fU mG (ps) fG (ps) mC | 740 | 351 |
| EM1176 | EM1176-B | mG (ps) mC (ps) mC mA mG mU fC fU fC mU mU mU mU mC mA mU mA (ps) mC (ps) mU | 741 | 352 |
| EM1177 | EM1177-A | mG (ps) fU (ps) mU fA mG fC mA fG mU fU mA fC mA fC mU fU mC (ps) fC (ps) mC | 742 | 353 |
| EM1177 | EM1177-B | mG (ps) mG (ps) mG mA mA mG fU fG fU mA mA mC mU mG mC mU mA (ps) mA (ps) mC | 743 | 354 |
| EM1178 | EM1178-A | mA (ps) fG (ps) mC fC mA fG mU fA mU fG mA fA mA fA mG fA mG (ps) fA (ps) mC | 744 | 355 |
| EM1178 | EM1178-B | mG (ps) mU (ps) mC mU mC mU fU fU fU mC mA mU mA mC mU mG mG (ps) mC (ps) mU | 745 | 356 |
| EM1179 | EM1179-A | mG (ps) fA (ps) mU fG mU fA mU fU mU fG mG fC mU fU mG fC mA (ps) fC (ps) mA | 746 | 357 |
| EM1179 | EM1179-B | mU (ps) mG (ps) mU mG mC mA fA fG fC mC mA mA mA mU mA mC mA (ps) mU (ps) mC | 747 | 358 |
| EM1180 | EM1180-A | mA (ps) fA (ps) mU fG mC fC mA fA mC fA mG fC mC fA mG fU mA (ps) fU (ps) mG | 748 | 359 |
| EM1180 | EM1180-B | mC (ps) mA (ps) mU mA mC mU fG fG fC mU mG mU mU mG mG mC mA (ps) mU (ps) mU | 749 | 360 |
| EM1181 | EM1181-A | mA (ps) fG (ps) mC fA mU fG mU fU mA fG mC fA mG fU mU fA mC (ps) fA (ps) mC | 750 | 361 |
| EM1181 | EM1181-B | mG (ps) mU (ps) mG mU mA mA fC fU fG mC mU mA mA mC mA mU mG (ps) mC (ps) mU | 751 | 362 |
| EM1182 | EM1182-A | mU (ps) fG (ps) mU fC mA fU mA fU mA fA mA fA mG fU mG fC mA (ps) fC (ps) mC | 752 | 363 |
| EM1182 | EM1182-B | mG (ps) mG (ps) mU mG mC mA fC fU fU mU mU mA mU mA mU mG mA (ps) mC (ps) mA | 753 | 364 |
| EM1183 | EM1183-A | mG (ps) fC (ps) mC fA mA fC mA fG mC fC mA fG mU fA mU fG mA (ps) fA (ps) mA | 754 | 365 |
| EM1183 | EM1183-B | mU (ps) mU (ps) mU mC mA mU fA fC fU mG mG mC mU mG mU mU mG (ps) mG (ps) mC | 755 | 366 |
| EM1184 | EM1184-A | mA (ps) fC (ps) mA fA mA fG mU fC mC fA mG fA mA fU mG fA mC (ps) fA (ps) mC | 756 | 367 |
| EM1184 | EM1184-B | mG (ps) mU (ps) mG mU mC mA fU fU fC mU mG mG mA mC mU mU mU (ps) mG (ps) mU | 757 | 368 |
| EM1185 | EM1185-A | mA (ps) fG (ps) mG fU mU fC mA fG mG fC mC fA mC fU mU fC mG (ps) fG (ps) mG | 758 | 369 |
| EM1185 | EM1185-B | mC (ps) mC (ps) mC mG mA mA fG fU fG mG mC mC mU mG mA mA mC (ps) mC (ps) mU | 759 | 370 |
| EM1186 | EM1186-A | mC (ps) fU (ps) mA fA mU fA mU fC mA fG mG fA mC fU mU fG mC (ps) fC (ps) mA | 760 | 371 |
| EM1186 | EM1186-B | mU (ps) mG (ps) mG mC mA mA fG fU fC mC mU mG mA mU mA mU mU (ps) mA (ps) mG | 761 | 372 |
| EM1187 | EM1187-A | mU (ps) fC (ps) mU fG mU fG mA fC mA fA mA fG mG fU mG fA mU (ps) fG (ps) mG | 762 | 373 |
| EM1187 | EM1187-B | mC (ps) mC (ps) mA mU mC mA fC fC fU mU mU mG mU mC mA mC mA (ps) mG (ps) mA | 763 | 374 |
| EM1188 | EM1188-A | mU (ps) fU (ps) mU fC mA fU mA fU mG fC mA fG mC fA mG fU mA (ps) fC (ps) mA | 764 | 375 |
| EM1188 | EM1188-B | mU (ps) mG (ps) mU mA mC mU fG fC fU mG mC mA mU mA mU mG mA (ps) mA (ps) mA | 765 | 376 |
| EM1189 | EM1189-A | mA (ps) fA (ps) mG fA mC fC mU fG mG fC mC fG mG fA mG fC mA (ps) fC (ps) mA | 766 | 377 |
| EM1189 | EM1189-B | mU (ps) mG (ps) mU mG mC mU fC fC fG mG mC mC mA mG mG mU mC (ps) mU (ps) mU | 767 | 378 |
| EM1190 | EM1190-A | mU (ps) fC (ps) mA fU mG fG mU fG mU fG mC fC mC fG mU fC mC (ps) fA (ps) mG | 768 | 379 |
| EM1190 | EM1190-B | mC (ps) mU (ps) mG mG mA mC fG fG fG mC mA mC mA mC mC mA mU (ps) mG (ps) mA | 769 | 380 |
| EM1191 | EM1191-A | mG (ps) fA (ps) mA fG mG fU mA fA mU fG mU fC mC fA mG fG mC (ps) fU (ps) mG | 770 | 381 |
| EM1191 | EM1191-B | mC (ps) mA (ps) mG mC mC mU fG fG fA mC mA mU mU mA mC mC mU (ps) mU (ps) mC | 771 | 382 |
| EM1192 | EM1192-A | mA (ps) fA (ps) mG fU mC fG mU fA mC fU mC fG mC fA mG fA mG (ps) fG (ps) mU | 772 | 383 |
| EM1192 | EM1192-B | mA (ps) mC (ps) mC mU mC mU fG fC fG mA mG mU mA mC mG mA mC (ps) mU (ps) mU | 773 | 384 |
| EM1214 | EM1214-A | (vp)-mU fU mG fG mG fU mG fA mA fG mU fA mG fA mG fG mC (ps) fG (ps) mC | 774 | 385 |
| EM1214 | EM1214-B | mG mC mG mC mC mU fC fU fA mC mU mU mC mA mC mC mC (ps) mA (ps) mC | 775 | 178 |
| EM1215 | EM1215-A | (vp)-mU fA mC fG mA fA mG fU mC fG mU fA mC fU mC fG mC (ps) fA (ps) mG | 776 | 386 |
| EM1215 | EM1215-B | mC mU mG mC mG mA fG fU fA mC mG mA mC mU mU mC mG (ps) mU (ps) mC | 777 | 310 |
| EM1216 | EM1216-A | (vp)-mU fU mA fG mA fA mG fG mC fC mU fC mG fA mA fC mC (ps) fC (ps) mC | 778 | 387 |
| EM1216 | EM1216-B | mG mG mG mG mU mU fC fG fA mG mG mC mC mU mU mC mU (ps) mA (ps) mU | 779 | 346 |
| EM1217 | EM1217-A | (vp)-mU fA mA fG mG fU mA fA mU fG mU fC mC fA mG fG mC (ps) fU (ps) mG | 780 | 388 |
| EM1217 | EM1217-B | mC mA mG mC mC mU fG fG fA mC mA mU mU mA mC mC mU (ps) mU (ps) mC | 781 | 382 |
| EM1218 | EM1218-A | (vp)-mU fA mG fU mC fG mU fA mC fU mC fG mC fA mG fA mG (ps) fG (ps) mU | 782 | 389 |
| EM1218 | EM1218-B | mA mC mC mU mC mU fG fC fG mA mG mU mA mC mG mA mC (ps) mU (ps) mU | 783 | 384 |
| EM1219 | EM1219-A | (vp)-mU fC mU fC mG fU mU fG mG fA mG fU mA fG mU fC mG (ps) fG (ps) mA | 794 | 147 |
| EM1219 | EM1219-B | mU mC mC mG mA mC fU fA fC mU mC mC mA mA mC mG mA (ps) mG (ps) mA | 816 | 148 |
| EM1220 | EM1220-A | (vp)-mU fU mG fG mA fG mU fA mG fU mC fG mG fA mG fC mG (ps) fG (ps) mA | 798 | 199 |
| EM1220 | EM1220-B | mU mC mC mG mC mU fC fC fG mA mC mU mA mC mU mC mC (ps) mA (ps) mA | 817 | 200 |
| EM1221 | EM1221-A | (vp)-mU fU mG fA mC fG mA fA mG fU mC fG mU fA mC fU mC (ps) fG (ps) mC | 800 | 235 |
| EM1221 | EM1221-B | mG mC mG mA mG mU fA fC fG mA mC mU mU mC mG mU mC (ps) mA (ps) mA | 818 | 236 |
| EM1222 | EM1222-A | (vp)-mU fA mG fU mC fG mG fA mG fC mG fG mA fA mG fG mU (ps) fA (ps) mA | 802 | 237 |
| EM1222 | EM1222-B | mU mU mA mC mC mU fU fC fC mG mC mU mC mC mG mA mC (ps) mU (ps) mA | 819 | 238 |
| EM1223 | EM1223-A | (vp)-mU fC mG fG mA fG mC fG mG fA mA fG mG fU mA fA mU (ps) fG (ps) mU | 804 | 245 |
| EM1223 | EM1223-B | mA mC mA mU mU mA fC fC fU mU mC mC mG mC mU mC mC (ps) mG (ps) mA | 820 | 246 |

TABLE 5c
Modified GalNAc-conjugated duplexes

| | | | | Unmodified |
|---|---|---|---|---|
| Duplex | Strand | | | equivalent |
| ID | Name (*) | Sequence (5′→3′) | SEQ ID No. | SEQ ID No. |
| EM1193 | EM1074-A | mU (ps) fC (ps) mU fC mG fU mU fG mG fA mG fU mA fG mU fC mG (ps) fG (ps) mA | 536 | 147 |
| EM1193 | EM1193-B | [ST23(ps)]3 ST41 (ps) mU mC mC mG mA mC fU fA fC mU mC mC mA mA mC mG | 784 | 148 |
| | | mA (ps) mG (ps) mA | | |
| EM1194 | EM1089-A | mG (ps) fU (ps) mG fG mG fU mG fA mA fG mU fA mG fA mG fG mC (ps) fG (ps) mC | 566 | 177 |
| EM1194 | EM1194-B | [ST23(ps)]3 ST41 (ps) mG mC mG mC mC mU fC fU fA mC mU mU mC mA mC mC | 785 | 178 |
| | | mC (ps) mA (ps) mC | | |
| EM1195 | EM1100-A | mU (ps) fU (ps) mG fG mA fG mU fA mG fU mC fG mG fA mG fC mG (ps) fG (ps) mA | 588 | 199 |
| EM1195 | EM1195-B | [ST23(ps)]3 ST41 (ps) mU mC mC mG mC mU fC fC fG mA mC mU mA mC mU mC | 786 | 200 |
| | | mC (ps) mA (ps) mA | | |
| EM1196 | EM1118-A | mU (ps) fU (ps) mG fA mC fG mA fA mG fU mC fG mU fA mC fU mC (ps) fG (ps) mC | 624 | 235 |
| EM1196 | EM1196-B | [ST23(ps)]3 ST41 (ps) mG mC mG mA mG mU fA fC fG mA mC mU mU mC mG mU | 787 | 236 |
| | | mC (ps) mA (ps) mA | | |
| EM1197 | EM1119-A | mU (ps) fA (ps) mG fU mC fG mG fA mG fC mG fG mA fA mG fG mU (ps) fA (ps) mA | 626 | 237 |
| EM1197 | EM1197-B | [ST23(ps)]3 ST41 (ps) mU mU mA mC mC mU fU fC fC mG mC mU mC mC mG mA | 788 | 238 |
| | | mC (ps) mU (ps) mA | | |
| EM1198 | EM1123-A | mU (ps) fC (ps) mG fG mA fG mC fG mG fA mA fG mG fU mA fA mU (ps) fG (ps) mU | 634 | 245 |
| EM1198 | EM1198-B | [ST23(ps)]3 ST41 (ps) mA mC mA mU mU mA fC fC fU mU mC mC mG mC mU mC | 789 | 246 |
| | | mC (ps) mG (ps) mA | | |
| EM1199 | EM1155-A | mG (ps) fA (ps) mC fG mA fA mG fU mC fG mU fA mC fU mC fG mC (ps) fA (ps) mG | 698 | 309 |
| EM1199 | EM1199-B | [ST23(ps)]3 ST41 (ps) mC mU mG mC mG mA fG fU fA mC mG mA mC mU mU mC | 790 | 310 |
| | | mG (ps) mU (ps) mC | | |
| EM1200 | EM1173-A | mA (ps) fU (ps) mA fG mA fA mG fG mC fC mU fC mG fA mA fC mC (ps) fC (ps) mC | 734 | 345 |
| EM1200 | EM1200-B | [ST23(ps)]3 ST41 (ps) mG mG mG mG mU mU fC fG fA mG mG mC mC mU mU mC | 791 | 346 |
| | | mU (ps) mA (ps) mU | | |
| EM1201 | EM1191-A | mG (ps) fA (ps) mA fG mG fU mA fA mU fG mU fC mC fA mG fG mC (ps) fU (ps) mG | 770 | 381 |
| EM1201 | EM1201-B | [ST23(ps)]3 ST41 (ps) mC mA mG mC mC mU fG fG fA mC mA mU mU mA mC mC | 792 | 382 |
| | | mU (ps) mU (ps) mC | | |
| EM1202 | EM1192-A | mA (ps) fA (ps) mG fU mC fG mU fA mC fU mC fG mC fA mG fA mG (ps) fG (ps) mU | 772 | 383 |
| EM1202 | EM1202-B | [ST23(ps)]3 ST41 (ps) mA mC mC mU mC mU fG fC fG mA mG mU mA mC mG mA | 793 | 384 |
| | | mC (ps) mU (ps) mU | | |
| EM1203 | EM1203-A | (vp)-mU fC mU fC mG fU mU fG mG fA mG fU mA fG mU fC mG (ps) fG (ps) mA | 794 | 147 |
| EM1203 | EM1193-B | [ST23(ps)]3 ST41 (ps) mU mC mC mG mA mC fU fA fC mU mC mC mA mA mC mG | 795 | 148 |
| | | mA (ps) mG (ps) mA | | |
| EM1204 | EM1204-A | (vp)-mU fU mG fG mG fU mG fA mA fG mU fA mG fA mG fG mC (ps) fG (ps) mC | 796 | 385 |
| EM1204 | EM1194-B | [ST23(ps)]3 ST41 (ps) mG mC mG mC mC mU fC fU fA mC mU mU mC mA mC mC | 797 | 178 |
| | | mC (ps) mA (ps) mC | | |
| EM1205 | EM1205-A | (vp)-mU fU mG fG mA fG mU fA mG fU mC fG mG fA mG fC mG (ps) fG (ps) mA | 798 | 199 |
| EM1205 | EM1195-B | [ST23(ps)]3 ST41 (ps) mU mC mC mG mC mU fC fC fG mA mC mU mA mC mU mC | 799 | 200 |
| | | mC (ps) mA (ps) mA | | |
| EM1206 | EM1206-A | (vp)-mU fU mG fA mC fG mA fA mG fU mC fG mU fA mC fU mC (ps) fG (ps) mC | 800 | 235 |
| EM1206 | EM1196-B | [ST23(ps)]3 ST41 (ps) mG mC mG mA mG mU fA fC fG mA mC mU mU mC mG mU | 801 | 236 |
| | | mC (ps) mA (ps) mA | | |
| EM1207 | EM1207-A | (vp)-mU fA mG fU mC fG mG fA mG fC mG fG mA fA mG fG mU (ps) fA (ps) mA | 802 | 237 |
| EM1207 | EM1197-B | [ST23(ps)]3 ST41 (ps) mU mU mA mC mC mU fU fC fC mG mC mU mC mC mG mA | 803 | 238 |
| | | mC (ps) mU (ps) mA | | |
| EM1208 | EM1208-A | (vp)-mU fC mG fG mA fG mC fG mG fA mA fG mG fU mA fA mU (ps) fG (ps) mU | 804 | 245 |
| EM1208 | EM1198-B | [ST23(ps)]3 ST41 (ps) mA mC mA mU mU mA fC fC fU mU mC mC mG mC mU mC | 805 | 246 |
| | | mC (ps) mG (ps) mA | | |
| EM1209 | EM1209-A | (vp)-mU fA mC fG mA fA mG fU mC fG mU fA mC fU mC fG mC (ps) fA (ps) mG | 806 | 386 |
| EM1209 | EM1199-B | [ST23(ps)]3 ST41 (ps) mC mU mG mC mG mA fG fU fA mC mG mA mC mU mU mC | 807 | 310 |
| | | mG (ps) mU (ps) mC | | |
| EM1210 | EM1210-A | (vp)-mU fU mA fG mA fA mG fG mC fC mU fC mG fA mA fC mC (ps) fC (ps) mC | 808 | 387 |
| EM1210 | EM1200-B | [ST23(ps)]3 ST41 (ps) mG mG mG mG mU mU fC fG fA mG mG mC mC mU mU mC | 809 | 346 |
| | | mU (ps) mA (ps) mU | | |
| EM1211 | EM1211-A | (vp)-mU fA mA fG mG fU mA fA mU fG mU fC mC fA mG fG mC (ps) fU (ps) mG | 810 | 388 |
| EM1211 | EM1201-B | [ST23(ps)]3 ST41 (ps) mC mA mG mC mC mU fG fG fA mC mA mU mU mA mC mC | 811 | 382 |
| | | mU (ps) mU (ps) mC | | |
| EM1212 | EM1212-A | (vp)-mU fA mG fU mC fG mU fA mC fU mC fG mC fA mG fA mG (ps) fG (ps) mU | 812 | 389 |
| EM1212 | EM1202-B | [ST23(ps)]3 ST41 (ps) mA mC mC mU mC mU fG fC fG mA mG mU mA mC mG mA | 813 | 384 |
| | | mC (ps) mU (ps) mU | | |
| EM1213 | EM1213-A | (vp)-mU (ps) fG (ps) mG fC mA fG mA fC mA fA mA fU mA fG mG fC mG (ps) fU (ps) | 814 | 289 |
| | | mG | | |
| EM1213 | EM1204-B | [ST23(ps)]3 ST41 (ps) mC mA mC mG mC mC fU fA fU mU mU mG mU mC mU mG | 815 | 290 |
| | | mC (ps) mC (ps) mA | | |

>NM_006610.4 Homo sapiens MBL associated serine protease 2 (MASP-2),
transcript variant 1, mRNA
SEQ ID No. 821
AGACCAGGCCAGGCCAGCTGGACGGGCACACCATGAGGCTGCTGACCCTCCTGGGCCTTCTGTGTGGCTC
GGTGGCCACCCCCTTGGGCCCGAAGTGGCCTGAACCTGTGTTCGGGCGCCTGGCATCCCCCGGCTTTCCA
GGGGAGTATGCCAATGACCAGGAGCGGCGCTGGACCCTGACTGCACCCCCCGGCTACCGCCTGCGCCTCT
ACTTCACCCACTTCGACCTGGAGCTCTCCCACCTCTGCGAGTACGACTTCGTCAAGCTGAGCTCGGGGGC
CAAGGTGCTGGCCACGCTGTGCGGGCAGGAGAGCACAGACACGGAGCGGGCCCCTGGCAAGGACACTTTC
TACTCGCTGGGCTCCAGCCTGGACATTACCTTCCGCTCCGACTACTCCAACGAGAAGCCGTTCACGGGGT
TCGAGGCCTTCTATGCAGCCGAGGACATTGACGAGTGCCAGGTGGCCCCGGGAGAGGCGCCCACCTGCGA
CCACCACTGCCACAACCACCTGGGCGGTTTCTACTGCTCCTGCCGCGCAGGCTACGTCCTGCACCGTAAC
AAGCGCACCTGCTCAGCCCTGTGCTCCGGCCAGGTCTTCACCCAGAGGTCTGGGGAGCTCAGCAGCCCTG
AATACCCACGGCCGTATCCCAAACTCTCCAGTTGCACTTACAGCATCAGCCTGGAGGAGGGGTTCAGTGT
CATTCTGGACTTTGTGGAGTCCTTCGATGTGGAGACACACCCTGAAACCCTGTGTCCCTACGACTTTCTC
AAGATTCAAACAGACAGAGAAGAACATGGCCCATTCTGTGGGAAGACATTGCCCCACAGGATTGAAACAA
AAAGCAACACGGTGACCATCACCTTTGTCACAGATGAATCAGGAGACCACACAGGCTGGAAGATCCACTA
CACGAGCACAGCGCAGCCTTGCCCTTATCCGATGGCGCCACCTAATGGCCACGTTTCACCTGTGCAAGCC
AAATACATCCTGAAAGACAGCTTCTCCATCTTTTGCGAGACTGGCTATGAGCTTCTGCAAGGTCACTTGC
CCCTGAAATCCTTTACTGCAGTTTGTCAGAAAGATGGATCTTGGGACCGGCCAATGCCCGCGTGCAGCAT
TGTTGACTGTGGCCCTCCTGATGATCTACCCAGTGGCCGAGTGGAGTACATCACAGGTCCTGGAGTGACC
ACCTACAAAGCTGTGATTCAGTACAGCTGTGAAGAGACCTTCTACACAATGAAAGTGAATGATGGTAAAT
ATGTGTGTGAGGCTGATGGATTCTGGACGAGCTCCAAAGGAGAAAAATCACTCCCAGTCTGTGAGCCTGT
TTGTGGACTATCAGCCCGCACAACAGGAGGGCGTATATATGGAGGGCAAAAGGCAAAACCTGGTGATTTT
CCTTGGCAAGTCCTGATATTAGGTGGAACCACAGCAGCAGGTGCACTTTTATATGACAACTGGGTCCTAA
CAGCTGCTCATGCCGTCTATGAGCAAAAACATGATGCATCCGCCCTGGACATTCGAATGGGCACCCTGAA
AAGACTATCACCTCATTATACACAAGCCTGGTCTGAAGCTGTTTTTATACATGAAGGTTATACTCATGAT
GCTGGCTTTGACAATGACATAGCACTGATTAAATTGAATAACAAAGTTGTAATCAATAGCAACATCACGC
CTATTTGTCTGCCAAGAAAAGAAGCTGAATCCTTTATGAGGACAGATGACATTGGAACTGCATCTGGATG
GGGATTAACCCAAAGGGGTTTTCTTGCTAGAAATCTAATGTATGTCGACATACCGATTGTTGACCATCAA
AAATGTACTGCTGCATATGAAAAGCCACCCTATCCAAGGGGAAGTGTAACTGCTAACATGCTTTGTGCTG
GCTTAGAAAGTGGGGGCAAGGACAGCTGCAGAGGTGACAGCGGAGGGGCACTGGTGTTTCTAGATAGTGA
AACAGAGAGGTGGTTTGTGGGAGGAATAGTGTCCTGGGGTTCCATGAATTGTGGGGAAGCAGGTCAGTAT
GGAGTCTACACAAAAGTTATTAACTATATTCCCTGGATCGAGAACATAATTAGTGATTTTTAACTTGCGT
GTCTGCAGTCAAGGATTCTTCATTTTTAGAAATGCCTGTGAAGACCTTGGCAGCGACGTGGCTCGAGAAG
CATTCATCATTACTGTGGACATGGCAGTTGTTGCTCCACCCAAAAAAACAGACTCCAGGTGAGGCTGCTG
TCATTTCTCCACTTGCCAGTTTAATTCCAGCCTTACCCATTGACTCAAGGGGACATAAACCACGAGAGTG
ACAGTCATCTTTGCCCACCCAGTGTAATGTCACTGCTCAAATTACATTTCATTACCTTAAAAAGCCAGTC
TCTTTTCATACTGGCTGTTGGCATTTCTGTAAACTGCCTGTCCATGCTCTTTGTTTTTAAACTTGTTCTT
ATTGA

### Statements

[0696] The following statements represent aspects of the invention.
[0697] 1. A double-stranded nucleic acid for inhibiting expression of MASP-2, wherein the nucleic acid comprises a first strand and a second strand, wherein the unmodified equivalent of the first strand sequence comprises a sequence of at least 15 nucleotides differing by no more than 3 nucleotides from any one of the first strand sequences shown in Table 5a, or of Table 1.
[0698] 2. The nucleic acid of statement 1, wherein the first strand and the second strand are separate strands and are each 18-25 nucleotides in length.
[0699] 3. The nucleic acid of statement 1 or statement 2, wherein the first strand and the second strand form a duplex region of from 17-25 nucleotides in length.
[0700] 4. The nucleic acid of any one of the preceding statements, wherein the duplex region consists of 17-25 consecutive nucleotide base pairs.
[0701] 5. The nucleic acid of any one of the preceding statements, wherein said nucleic acid:
   [0702] a) is blunt ended at both ends;
   [0703] b) has an overhang at one end and a blunt end at the other end; or
   [0704] c) has an overhang at both ends.
[0705] 6. The nucleic acid of any one of the preceding statements, wherein the nucleic acid is a siRNA.
[0706] 7. The nucleic acid of any one of the preceding statements, wherein the nucleic acid mediates RNA interference.
[0707] 8. The nucleic acid of any one of the preceding statements, wherein:
[0708] (a) the unmodified equivalent of the first strand sequence comprises a sequence differing by no more than 3 nucleotides from any one of the first strand sequences of Table 5a, and optionally wherein the unmodified equivalent of the second strand sequence comprises a sequence differing by no more than 3 nucleotides from the corresponding second strand sequence of Table 5a;
[0709] (b) the unmodified equivalent of the first strand sequence comprises a sequence differing by no more than 2 nucleotides from any one of the first strand sequences of Table 5a, and optionally wherein the unmodified equivalent of the second strand sequence comprises a sequence differing by no more than 2 nucleotides from the corresponding second strand sequence of Table 5a;
[0710] (c) the unmodified equivalent of the first strand sequence comprises a sequence differing by no more than 1 nucleotide from any one of the first strand sequences of Table 5a, and optionally wherein the unmodified equivalent of the second strand sequence comprises a sequence differing by no more than 1 nucleotide from the corresponding second strand sequence of Table 5a;
[0711] (d) the unmodified equivalent of the first strand sequence comprises a sequence corresponding to nucleotides 2 to 17 from the 5′ end of any one of the first strand sequences with a given SEQ ID No. shown in Table 5a, and optionally wherein the unmodified equivalent of the second strand sequence comprises a sequence corresponding to nucleotides 2 to 17 from the 5′ end of the corresponding second strand sequence with a given SEQ ID No. shown in Table 5a;
[0712] (e) the unmodified equivalent of the first strand sequence comprises a sequence corresponding to nucleotides 2 to 18 from the 5′ end of any one of the first strand sequences with a given SEQ ID No. shown in Table 5a, and optionally wherein the unmodified equivalent of the second strand sequence comprises a sequence corresponding to nucleotides 2 to 18 from the 5′ end of the corresponding second strand sequence with a given SEQ ID No. shown in Table 5a;
[0713] (f) the unmodified equivalent of the first strand sequence comprises a sequence corresponding to nucleotides 2 to 19 from the 5′ end of any one of the first strand sequences with a given SEQ ID No. shown in Table 5a, and optionally wherein the unmodified equivalent of the second strand sequence comprises a sequence corresponding to nucleotides 2 to 19 from the 5′ end of the corresponding second strand sequence with a given SEQ ID No. shown in Table 5a;
[0714] (g) the unmodified equivalent of the first strand sequence comprises a sequence corresponding to nucleotides 2 to 19 from the 5′ end of any one of the first strand sequences with a given SEQ ID No. shown in Table 5a, and optionally wherein the unmodified equivalent of the second strand sequence comprises a sequence corresponding to nucleotides 1 to 18 from the 5′ end of the corresponding second strand sequence with a given SEQ ID No. shown in Table 5a;
[0715] (h) the unmodified equivalent of the first strand sequence comprises a sequence of any one of the first strand sequences with a given SEQ ID No. shown in Table 5a, and optionally wherein the unmodified equivalent of the second strand sequence comprises a sequence of the corresponding second strand sequence with a given SEQ ID No. shown in Table 5a; or
[0716] (i) the unmodified equivalent of the first strand sequence essentially consists of any one of the first strand sequences with a given SEQ ID No. shown in Table 5a, and optionally wherein the unmodified equivalent of the second strand sequence essentially consists of the sequence of the corresponding second strand sequence with a given SEQ ID No. shown in Table 5a.
[0717] (j) the unmodified equivalent of the first strand sequence consists of any one of the first strand sequences with a given SEQ ID No. shown in Table 5a, and optionally wherein the unmodified equivalent of the second strand sequence consists of the sequence of the corresponding second strand sequence with a given SEQ ID No. shown in Table 5a.
[0718] 9. The nucleic acid of any one of the preceding statements, wherein:
[0719] (a) the unmodified equivalent of the first strand sequence comprises a sequence differing by no more than 3 nucleotides from any one of the first strand sequences of Table 1, and optionally wherein the unmodified equivalent of the second strand sequence comprises a sequence differing by no more than 3 nucleotides from the corresponding second strand sequence of Table 1;
[0720] (b) the unmodified equivalent of the first strand sequence comprises a sequence differing by no more than 2 nucleotides from any one of the first strand sequences of Table 1, and optionally wherein the unmodified equivalent of the second strand sequence comprises a sequence differing by no more than 2 nucleotides from the corresponding second strand sequence of Table 1;
[0721] (c) the unmodified equivalent of the first strand sequence comprises a sequence differing by no more than 1 nucleotide from any one of the first strand sequences of Table 1, and optionally wherein the unmodified equivalent of the second strand sequence comprises a sequence differing by no more than 1 nucleotide from the corresponding second strand sequence of Table 1;
[0722] (d) the unmodified equivalent of the first strand sequence comprises a sequence corresponding to nucleotides 2 to 17 from the 5′ end of any one of the first strand sequences of Table 1, and optionally wherein the unmodified equivalent of the second strand sequence comprises a sequence corresponding to nucleotides 2 to 17 from the 5′ end of the corresponding second strand sequence of Table 1;
[0723] (e) the unmodified equivalent of the first strand sequence comprises a sequence corresponding to nucleotides 2 to 18 from the 5′ end of any one of the first strand sequences of Table 1, and optionally wherein the unmodified equivalent of the second strand sequence comprises a sequence corresponding to nucleotides 2 to 18 from the 5′ end of the corresponding second strand sequence of Table 1;
[0724] (f) the unmodified equivalent of the first strand sequence comprises a sequence corresponding to nucleotides 2 to 19 from the 5′ end of any one of the first strand sequences of Table 1, and optionally wherein the unmodified equivalent of the second strand sequence comprises a sequence corresponding to nucleotides 2 to 19 from the 5′ end of the corresponding second strand sequence of Table 1;
[0725] (g) the unmodified equivalent of the first strand sequence comprises a sequence corresponding to nucleotides 2 to 19 from the 5′ end of any one of the first strand sequences of Table 1, and optionally wherein the unmodified equivalent of the second strand sequence comprises a sequence corresponding to nucleotides 1 to 18 from the 5′ end of the corresponding second strand sequence of Table 1;
[0726] (h) the unmodified equivalent of the first strand sequence comprises a sequence of any one of the first strand sequences of Table 1, and optionally wherein the unmodified equivalent of the second strand sequence comprises a sequence of the corresponding second strand sequence of Table 1; or
[0727] (i) the unmodified equivalent of the first strand sequence essentially consists of any one of the first strand sequences of Table 1, and optionally wherein the unmodified equivalent of the second strand sequence essentially consists of the sequence of the corresponding second strand sequence of Table 1.
[0728] (j) the unmodified equivalent of the first strand sequence consists of any one of the first strand sequences of Table 1, and optionally wherein the unmodified equivalent of the second strand sequence consists of the sequence of the corresponding second strand sequence of Table 1.
[0729] (k) the unmodified equivalent of the first strand sequence consists of a sequence corresponding to nucleotides 1 to 19 from the 5′ end of any one of the first strand sequences with a given SEQ ID No. shown in Table 1, wherein said unmodified equivalent of the first strand sequence further consists of 1 (nucleotide 20 counted from the 5′end), 2 (nucleotides 20 and 21), 3 (nucleotides 20, 21 and 22), 4 (nucleotides 20, 21, 22 and 23), 5 (nucleotides 20, 21, 22, 23 and 24) or 6 (nucleotides 20, 21, 22, 23, 24 and 25) additional nucleotide(s) at the 3′end of any one of the first strand sequences with a given SEQ ID No. shown in Table 1, and optionally wherein the unmodified equivalent of the second strand sequence comprises or consists essentially of or consists of a sequence of the corresponding second strand sequence with a given SEQ ID No. shown Table 1;
[0730] (l) the unmodified equivalent of the first strand sequence consists of a sequence corresponding to nucleotides 1 to 19 from the 5′ end of any one of the first strand sequences with a given SEQ ID No. shown in Table 1, wherein said unmodified equivalent of the first strand sequence further consists of 1 (nucleotide 20 counted from the 5′end), 2 (nucleotides 20 and 21), 3 (nucleotides 20, 21 and 22), 4 (nucleotides 20, 21, 22 and 23), 5 (nucleotides 20, 21, 22, 23 and 24) or 6 (nucleotides 20, 21, 22, 23, 24 and 25) additional nucleotide(s) at the 3′end of any one of the first strand sequences with a given SEQ ID No. shown in Table 1, and wherein said unmodified equivalent of the first strand sequence consists of a contiguous region of from 17-25 nucleotides in length, preferably of from 18-24 nucleotides in length, complementary to the MASP-2 transcript of SEQ ID NO. 821; and optionally wherein the unmodified equivalent of the second strand sequence comprises or consists essentially of or consists of a sequence of the corresponding second strand sequence with a given SEQ ID No. shown in Table 1;
[0731] (m) unmodified equivalent of the first strand and the unmodified equivalent of the second strand of any one of the nucleic acid molecules of subsections (a) to (l) above are present on a single strand wherein the unmodified equivalent of the first strand and the unmodified equivalent of the second strand are able to hybridise to each other and to thereby form a double-stranded nucleic acid with a duplex region of 17, 18, 19, 20, 21, 22, 23, 24 or 25 nucleotides in length; or
[0732] (n) the unmodified equivalent of the first strand and the unmodified equivalent of the second strand of any one of the nucleic acid molecules of subsections (a) to (l) above are on two separate strands that are able to hybridise to each other and to thereby form a double-stranded nucleic acid with a duplex region of 17, 18, 19, 20, 21, 22, 23, 24 or 25 nucleotides in length.
[0733] 10. The nucleic acid of any one of the preceding statements, wherein at least one nucleotide of the first and/or second strand is a modified nucleotide.
[0734] 11. The nucleic acid of statement 10, wherein at least nucleotides 2 and 14 of the first strand are modified by a first modification, the nucleotides being numbered consecutively starting with nucleotide number 1 at the 5′ end of the first strand with a given SEQ ID No.
[0735] 12 The nucleic acid of statement 10 or statement 11, wherein each of the even-numbered nucleotides of the first strand are modified by a first modification, the nucleotides being numbered consecutively starting with nucleotide number 1 at the 5′ end of the first strand with a given SEQ ID No.
[0736] 13. The nucleic acid of statement 11 or statement 12, wherein the odd-numbered nucleotides of the first strand with a given SEQ ID No. are modified by a second modification, wherein the second modification is different from the first modification.
[0737] 14. The nucleic acid of any one of statements 11 to 13, wherein the nucleotides of the second strand with a given SEQ ID No. in a position corresponding to an even-numbered nucleotide of the first strand with a given SEQ ID No. are modified by a third modification, wherein the third modification is different from the first modification.
[0738] 15. The nucleic acid of any one of statements 11 to 14, wherein the nucleotides of the second strand with a given SEQ ID No. in a position corresponding to an odd-numbered nucleotide of the first strand with a given SEQ ID No. are modified by a fourth modification, wherein the fourth modification is different from the second modification and different from the third modification when a second and/or a third modification are present.
[0739] 16. The nucleic acid of any one of statements 11 to 13, wherein the nucleotide/nucleotides of the second strand with a given SEQ ID No. in a position corresponding to nucleotide 11 or nucleotide 13 or nucleotides 11 and 13 or nucleotides 11-13 of the first strand with a given SEQ ID No. is/are modified by a fourth modification and preferably wherein the nucleotides of the second strand that are not modified by a fourth modification are modified by a third modification.
[0740] 17. The nucleic acid of any one of statements 11 to 16, wherein the first modification is the same as the fourth modification if both modifications are present in the nucleic acid and preferably wherein the second modification is the same as the third modification if both modifications are present in the nucleic acid.
[0741] 18. The nucleic acid of any one of statements 11 to 17, wherein the first modification is a 2′-F modification; the second modification, if present in the nucleic acid, is preferably a 2′-OMe modification; the third modification, if present in the nucleic acid, is preferably a 2′-OMe modification; and the fourth modification, if present in the nucleic acid, is preferably a 2′-F modification.
[0742] 19. The nucleic acid of any one of statements 10 to 18, wherein each of the nucleotides of the first strand and of the second strand is a modified nucleotide.
[0743] 20. The nucleic acid of any one of statements 10 to 19, wherein the first strand with a given SEQ ID No. has a terminal 5′ (E)-vinylphosphonate nucleotide at its 5′ end and wherein the terminal 5′ (E)-vinylphosphonate nucleotide is preferably linked to the second nucleotide in the first strand by a phosphodiester linkage.
[0744] 21. The nucleic acid of any one of the preceding statements, wherein the nucleic acid comprises a phosphorothioate linkage between the terminal two or three 3′ nucleotides and/or 5′ nucleotides of the first strand with a given SEQ ID No. and/or the second strand with a given SEQ ID No. and preferably wherein the linkages between the remaining nucleotides are phosphodiester linkages.
[0745] 22. The nucleic acid of any one of statements 1 to 20, comprising a phosphorodithioate linkage between each of the two, three or four terminal nucleotides at the 3′ end of the first strand with a given SEQ ID No. and/or comprising a phosphorodithioate linkage between each of the two, three or four terminal nucleotides at the 3′ end of the second strand with a given SEQ ID No. and/or a phosphorodithioate linkage between each of the two, three or four terminal nucleotides at the 5′ end of the second strand with a given SEQ ID No. and comprising a linkage other than a phosphorodithioate linkage between the two, three or four terminal nucleotides at the 5′ end of the first strand.
[0746] 23. The nucleic acid of any one of statements 1 to 20, wherein the nucleic acid comprises a phosphorothioate linkage between each of the two, three of four terminal nucleotides at the 3′ end of the first strand with a given SEQ ID No. and/or between each of the two, three or four terminal nucleotides at the 5′end of the first strand with a given SEQ ID No., and/or between each of the two, three or four terminal nucleotides at the 3′end of the second strand with a given SEQ ID No. and/or between each of the two, three or four terminal nucleotides at the 5′end of the second strand with a given SEQ ID No.
[0747] 24. The nucleic acid of any one of statements 1 to 20, wherein all the linkages between the nucleotides of both strands other than the linkage between the two terminal nucleotides at the 3′ end of the first strand and the linkages between the two terminal nucleotides at the 3′ end and at the 5′ end of the second strand are phosphodiester linkages.
[0748] 25. The nucleic acid of any one of statements 10 to 24, wherein:
[0749] (a) the unmodified equivalent of the first strand sequence comprises a sequence differing by no more than 3 nucleotides from any one of the first strand sequences of Table 5b, and optionally wherein the unmodified equivalent of the second strand sequence comprises a sequence differing by no more than 3 nucleotides from the corresponding second strand sequence of Table 5b;
[0750] (b) the unmodified equivalent of the first strand sequence comprises a sequence differing by no more than 2 nucleotides from any one of the first strand sequences of Table 5b, and optionally wherein the unmodified equivalent of the second strand sequence comprises a sequence differing by no more than 2 nucleotides from the corresponding second strand sequence of Table 5b;
[0751] (c) the unmodified equivalent of the first strand sequence comprises a sequence differing by no more than 1 nucleotide from any one of the first strand sequences of Table 5b, and optionally wherein the unmodified equivalent of the second strand sequence comprises a sequence differing by no more than 1 nucleotide from the corresponding second strand sequence of Table 5b;
[0752] (d) the unmodified equivalent of the first strand sequence comprises a sequence corresponding to nucleotides 2 to 17 from the 5′ end of any one of the first strand sequences with a given SEQ ID No. shown in Table 5b, and optionally wherein the unmodified equivalent of the second strand sequence comprises a sequence corresponding to nucleotides 2 to 17 from the 5′ end of the corresponding second strand sequence with a given SEQ ID No. shown in Table 5b;
[0753] (e) the unmodified equivalent of the first strand sequence comprises a sequence corresponding to nucleotides 2 to 18 from the 5′ end of any one of the first strand sequences with a given SEQ ID No. shown in Table 5b, and optionally wherein the unmodified equivalent of the second strand sequence comprises a sequence corresponding to nucleotides 2 to 18 from the 5′ end of the corresponding second strand sequence with a given SEQ ID No. shown in Table 5b;
[0754] (f) the unmodified equivalent of the first strand sequence comprises a sequence corresponding to nucleotides 2 to 19 from the 5′ end of any one of the first strand sequences with a given SEQ ID No. shown in Table 5b, and optionally wherein the unmodified equivalent of the second strand sequence comprises a sequence corresponding to nucleotides 2 to 19 from the 5′ end of the corresponding second strand sequence with a given SEQ ID No. shown in Table 5b;
[0755] (g) the unmodified equivalent of the first strand sequence comprises a sequence corresponding to nucleotides 2 to 19 from the 5′ end of any one of the first strand sequences with a given SEQ ID No. shown in Table 5b, and optionally wherein the unmodified equivalent of the second strand sequence comprises a sequence corresponding to nucleotides 1 to 18 from the 5′ end of the corresponding second strand sequence with a given SEQ ID No. shown in Table 5b;
[0756] (h) the unmodified equivalent of the first strand sequence comprises a sequence of any one of the first strand sequences with a given SEQ ID No. shown in Table 5b, and optionally wherein the unmodified equivalent of the second strand sequence comprises a sequence of the corresponding second strand sequence with a given SEQ ID No. shown in Table 5b; or
[0757] (i) the unmodified equivalent of the first strand sequence essentially consists of any one of the first strand sequences with a given SEQ ID No. shown in Table 5b, and optionally wherein the unmodified equivalent of the second strand sequence essentially consists of the sequence of the corresponding second strand sequence with a given SEQ ID No. shown in Table 5.
[0758] (j) the unmodified equivalent of the first strand sequence consists of any one of the first strand sequences with a given SEQ ID No. shown in Table 5b, and optionally wherein the unmodified equivalent of the second strand sequence consists of the sequence of the corresponding second strand sequence with a given SEQ ID No. shown in Table 5.
[0759] 26. The nucleic acid of any one of statements 10 to 25, wherein:
[0760] (a) the unmodified equivalent of the first strand sequence comprises a sequence differing by no more than 3 nucleotides from any one of the first strand sequences of Table 2, and optionally wherein the unmodified equivalent of the second strand sequence comprises a sequence differing by no more than 3 nucleotides from the corresponding second strand sequence of Table 2;
[0761] (b) the unmodified equivalent of the first strand sequence comprises a sequence differing by no more than 2 nucleotides from any one of the first strand sequences of Table 2, and optionally wherein the unmodified equivalent of the second strand sequence comprises a sequence differing by no more than 2 nucleotides from the corresponding second strand sequence of Table 2;
[0762] (c) the unmodified equivalent of the first strand sequence comprises a sequence differing by no more than 1 nucleotide from any one of the first strand sequences of Table 2, and optionally wherein the unmodified equivalent of the second strand sequence comprises a sequence differing by no more than 1 nucleotide from the corresponding second strand sequence of Table 2;
[0763] (d) the unmodified equivalent of the first strand sequence comprises a sequence corresponding to nucleotides 2 to 17 from the 5′ end of any one of the first strand sequences with a given SEQ ID No. shown in Table 2, and optionally wherein the unmodified equivalent of the second strand sequence comprises a sequence corresponding to nucleotides 2 to 17 from the 5′ end of the corresponding second strand sequence with a given SEQ ID No. shown in Table 2;
[0764] (e) the unmodified equivalent of the first strand sequence comprises a sequence corresponding to nucleotides 2 to 18 from the 5′ end of any one of the first strand sequences with a given SEQ ID No. shown in Table 2, and optionally wherein the unmodified equivalent of the second strand sequence comprises a sequence corresponding to nucleotides 2 to 18 from the 5′ end of the corresponding second strand sequence with a given SEQ ID No. shown in Table 2;
[0765] (f) the unmodified equivalent of the first strand sequence comprises a sequence corresponding to nucleotides 2 to 19 from the 5′ end of any one of the first strand sequences with a given SEQ ID No. shown in Table 2, and optionally wherein the unmodified equivalent of the second strand sequence comprises a sequence corresponding to nucleotides 2 to 19 from the 5′ end of the corresponding second strand sequence with a given SEQ ID No. shown in Table 2;
[0766] (g) the unmodified equivalent of the first strand sequence comprises a sequence corresponding to nucleotides 2 to 19 from the 5′ end of any one of the first strand sequences with a given SEQ ID No. shown in Table 2, and optionally wherein the unmodified equivalent of the second strand sequence comprises a sequence corresponding to nucleotides 1 to 18 from the 5′ end of the corresponding second strand sequence with a given SEQ ID No. shown in Table 2;
[0767] (h) the unmodified equivalent of the first strand sequence comprises a sequence of any one of the first strand sequences with a given SEQ ID No. shown in Table 2, and optionally wherein the unmodified equivalent of the second strand sequence comprises a sequence of the corresponding second strand sequence with a given SEQ ID No. shown in Table 2;
[0768] (i) the unmodified equivalent of the first strand sequence essentially consists of any one of the first strand sequences with a given SEQ ID No. shown in Table 2, and optionally wherein the unmodified equivalent of the second strand sequence essentially consists of the sequence of the corresponding second strand sequence with a given SEQ ID No. shown in Table 2;
[0769] (j) the unmodified equivalent of the first strand sequence consists of any one of the first strand sequences with a given SEQ ID No. shown in Table 2, and optionally wherein the unmodified equivalent of the second strand sequence consists of the sequence of the corresponding second strand sequence with a given SEQ ID No. shown in Table 2;
[0770] (k) the first strand sequence consists of a sequence corresponding to nucleotides 1 to 19 from the 5′ end of any one of the first strand sequences with a given SEQ ID No. shown in Table 2, wherein said first strand sequence further consists of 1 (nucleotide 20 counted from the 5′end), 2 (nucleotides 20 and 21), 3 (nucleotides 20, 21 and 22), 4 (nucleotides 20, 21, 22 and 23), 5 (nucleotides 20, 21, 22, 23 and 24) or 6 (nucleotides 20, 21, 22, 23, 24 and 25) additional nucleotide(s) at the 3′end of any one of the first strand sequences with a given SEQ ID No. shown in Table 2, and optionally wherein the second strand sequence comprises or consists essentially of or consists of a sequence of the corresponding second strand sequence with a given SEQ ID No. shown in Table 2;
[0771] (l) the first strand sequence consists of a sequence corresponding to nucleotides 1 to 19 from the 5′ end of any one of the first strand sequences with a given SEQ ID No. shown in Table 2, wherein said first strand sequence further consists of 1 (nucleotide 20 counted from the 5′end), 2 (nucleotides 20 and 21), 3 (nucleotides 20, 21 and 22), 4 (nucleotides 20, 21, 22 and 23), 5 (nucleotides 20, 21, 22, 23 and 24) or 6 (nucleotides 20, 21, 22, 23, 24 and 25) additional nucleotide(s) at the 3′end of any one of the first strand sequences with a given SEQ ID No. shown in Table 2, and wherein said first strand sequence consists of a contiguous region of from 17-25 nucleotides in length, preferably of from 18-24 nucleotides in length, complementary to the MASP-2 transcript of SEQ ID NO. 821, and
   [0772] optionally wherein the second strand sequence comprises or consists essentially of or consists of a sequence of the corresponding second strand sequence with a given SEQ ID No. shown in Table 2;
[0773] (m) the first strand and the second strand of any one of the nucleic acid molecules of subsections (a) to (l) above are present on a single strand wherein the first strand and the second strand are able to hybridise to each other and to thereby form a double-stranded nucleic acid with a duplex region of 17, 18, 19, 20, 21, 22, 23, 24 or 25 nucleotides in length; or
[0774] (n) the first strand and the second strand of any one of the nucleic acid molecules of subsections (a) to (l) above are on two separate strands that are able to hybridise to each other and to thereby form a double-stranded nucleic acid with a duplex region of 17, 18, 19, 20, 21, 22, 23, 24 or 25 nucleotides in length.
[0775] 27. The nucleic acid of any one of the preceding statements, wherein the nucleic acid is conjugated to a heterologous moiety.
[0776] 28. The nucleic acid of statement 27, wherein the heterologous moiety comprises (i) one or more N-acetyl galactosamine (GalNAc) moieties or derivatives thereof, and (ii) a linker, wherein the linker conjugates the at least one GalNAc moiety or derivative thereof to the nucleic acid.
[0777] 29. The nucleic acid of statement 27 or statement 28, wherein the nucleic acid is conjugated to a heterologous moiety comprising a compound of formula (II):

[S—X¹—P—X²]3-A-X³— (II)
[0778] wherein:
   [0779] S represents a functional component, e.g., a ligand, such as a saccharide, preferably wherein the saccharide is N-acetyl galactosamine;
   [0780] X¹ represents C₃-C₆ alkylene or (—CH₂—CH₂—O)ₘ(—CH₂)₂— wherein m is 1, 2, or 3;
   [0781] P is a phosphate or modified phosphate, preferably a thiophosphate;
   [0782] X² is alkylene or an alkylene ether of the formula (—CH₂)ₙ—O—CH₂— where n=1-6;
   [0783] A is a branching unit;
   [0784] X₃ represents a bridging unit;
   [0785] wherein a nucleic acid as defined in any of statements 1 to 27 is conjugated to X³ via a phosphate or modified phosphate, preferably a thiophosphate.
[0786] 30. The nucleic acid of any one of statements 27 to 29, wherein the first strand of the nucleic acid is a compound of formula (V):

[chemical structure]

[0787] wherein b is 0 or 1; and
[0788] wherein the second strand is a compound of formula (VI):

[chemical structure]

[0789] wherein:
   [0790] c and d are independently 0 or 1;
   [0791] Z₁ and Z₂ are respectively the first and second strand of the nucleic acid;
   [0792] Y is independently O or S;
   [0793] n is independently 0, 1, 2 or 3; and
   [0794] L₁ is a linker to which a ligand is attached, wherein L₁ is the same or different in formulae (V) and (VI), and is the same or different within formulae (V) and (VI) when L₁ is present more than once within the same formula;
[0795] and wherein b+c+d is 2 or 3.
[0796] 31. The nucleic acid of any one of statements 27 to 30 which is one of the duplexes with a given Duplex ID No. shown in Table 5c.
[0797] 32. A composition comprising a nucleic acid of any of the previous statements and a solvent and/or a delivery vehicle and/or a physiologically acceptable excipient and/or a carrier and/or a salt and/or a diluent and/or a buffer and/or a preservative.
[0798] 33. A composition comprising a nucleic acid of any one of statements 1 to 31 and a further therapeutic agent selected from the group comprising an oligonucleotide, a small molecule, a monoclonal antibody, a polyclonal antibody and a peptide.
[0799] 34. A nucleic acid of any one of statements 1 to 31 or a composition of statement 32 or 33 for use as a therapeutic agent.
[0800] 35. A nucleic acid of any one of statements 1 to 31 or a composition of statement 32 or 33 for use in the prophylaxis or treatment of a disease, disorder or syndrome.
[0801] 36. The nucleic acid or composition for use according to statement 35, wherein the disease, disorder or syndrome is a complement-mediated disease, disorder or syndrome.
[0802] 37. The nucleic acid or composition for use according to statement 35 or 36, wherein the disease, disorder or syndrome is associated with aberrant activation or over-activation of the complement pathway and/or with over-expression or ectopic expression or localisation or accumulation of MASP-2.
[0803] 38. The nucleic acid or composition for use according to any one of statements 35 to 37, wherein the disease, disorder or syndrome is:
   [0804] a) selected from the group comprising C3 glomerulopathy (C3G), paroxysmal nocturnal hemoglobinuria (PNH), atypical hemolytic uremic syndrome (aHUS), lupus nephritis, IgA nephropathy (IgA N), cold agglutinin disease (CAD), myasthenia gravis (MG), primary membranous nephropathy, immune complex-mediated glomerulonephritis (IC-mediated GN), post-infectious glomerulonephritis (PIGN), systemic lupus erythematosus (SLE), ischemia/reperfusion injury, age-related macular degeneration (AMD), rheumatoid arthritis (RA), antineutrophil cytoplasmic autoantibodies-associated vasculitis (ANCA-AV), dysbiotic periodontal disease, malarial anaemia, neuromyelitis optica, post-HCT/solid organ transplant (TMAs), Guillain-Barré syndrome, membranous glomerulonephritis, thrombotic thrombocytopenic purpura and sepsis;
   [0805] b) selected from the group comprising C3 glomerulopathy (C3G), paroxysmal nocturnal hemoglobinuria (PNH), atypical hemolytic uremic syndrome (aHUS), lupus nephritis, IgA nephropathy (IgA N) and primary membranous nephropathy;
   [0806] c) selected from the group comprising C3 glomerulopathy (C3G), antineutrophil cytoplasmic autoantibodies-associated vasculitis (ANCA-AV), atypical hemolytic uremic syndrome (aHUS), cold agglutinin disease (CAD), myasthenia gravis (MG), IgA nephropathy (IgA N), paroxysmal nocturnal hemoglobinuria (PNH);
   [0807] d) selected from the group comprising C3 glomerulopathy (C3G), cold agglutinin disease (CAD), myasthenia gravis (MG), neuromyelitis optica, atypical hemolytic uremic syndrome (aHUS), antineutrophil cytoplasmic autoantibodies-associated vasculitis (ANCA-AV), IgA nephropathy (IgA N), post-HCT/Solid Organ Transplant (TMAs), Guillain-Barré syndrome, paroxysmal nocturnal hemoglobinuria (PNH), membranous glomerulonephritis, lupus nephritis and thrombotic thrombocytopenic purpura
   [0808] e) selected from the group comprising C3 glomerulopathy (C3G), cold agglutinin disease (CAD) and IgA nephropathy (IgA N); or
   [0809] f) C3 glomerulopathy (C3G).
[0810] 39. Use of a nucleic acid of any one of statements 1 to 31 or a composition of statement 32 or 33 in the preparation of a medicament for prophylaxis or treatment of a disease, disorder or syndrome.
[0811] 40. A method of prophylaxis or treatment of a disease, disorder or syndrome comprising administering a pharmaceutically effective dose of a nucleic acid of any one of statements 1 to 31 or a composition of statement 32 or 33 to an individual in need of treatment, preferably wherein the nucleic acid or composition is administered to the subject subcutaneously, intravenously or by oral, rectal or intraperitoneal administration.

The application's sequence listing, which the Patent Office published only in electronic form, follows.

SEQUENCE LISTING (821 sequences)

SEQ ID NO: 1 - RNA, 19 nt, synthetic construct
  source 1..19: mol_type = other RNA
  ncRNA 1..19: ncRNA_class = siRNA
gacttgccaaggaaaatca

SEQ ID NO: 2 - RNA, 19 nt, synthetic construct
  source 1..19: mol_type = other RNA
  ncRNA 1..19: ncRNA_class = siRNA
tgattttccttggcaagtc

SEQ ID NO: 3 - RNA, 19 nt, synthetic construct
  source 1..19: mol_type = other RNA
  ncRNA 1..19: ncRNA_class = siRNA
tgggtagatcatcaggagg

SEQ ID NO: 4 - RNA, 19 nt, synthetic construct
  source 1..19: mol_type = other RNA
  ncRNA 1..19: ncRNA_class = siRNA
cctcctgatgatctaccca

SEQ ID NO: 5 - RNA, 19 nt, synthetic construct
  source 1..19: mol_type = other RNA
  ncRNA 1..19: ncRNA_class = siRNA
tccacatcgaaggactcca

SEQ ID NO: 6 - RNA, 19 nt, synthetic construct
  source 1..19: mol_type = other RNA
  ncRNA 1..19: ncRNA_class = siRNA
tggagtccttcgatgtgga

SEQ ID NO: 7 - RNA, 19 nt, synthetic construct
  source 1..19: mol_type = other RNA
  ncRNA 1..19: ncRNA_class = siRNA
ttggcttgcacaggtgaaa

SEQ ID NO: 8 - RNA, 19 nt, synthetic construct
  source 1..19: mol_type = other RNA
  ncRNA 1..19: ncRNA_class = siRNA
tttcacctgtgcaagccaa

SEQ ID NO: 9 - RNA, 19 nt, synthetic construct
  source 1..19: mol_type = other RNA
  ncRNA 1..19: ncRNA_class = siRNA
attgtgtagaaggtctctt

SEQ ID NO: 10 - RNA, 19 nt, synthetic construct
  source 1..19: mol_type = other RNA
  ncRNA 1..19: ncRNA_class = siRNA
aagagaccttctacacaat

SEQ ID NO: 11 - RNA, 19 nt, synthetic construct
  source 1..19: mol_type = other RNA
  ncRNA 1..19: ncRNA_class = siRNA
acagctttgtaggtggtca

SEQ ID NO: 12 - RNA, 19 nt, synthetic construct
  source 1..19: mol_type = other RNA
  ncRNA 1..19: ncRNA_class = siRNA
tgaccacctacaaagctgt

SEQ ID NO: 13 - RNA, 19 nt, synthetic construct
  source 1..19: mol_type = other RNA
  ncRNA 1..19: ncRNA_class = siRNA
agtagaggcgcaggcggta

SEQ ID NO: 14 - RNA, 19 nt, synthetic construct
  source 1..19: mol_type = other RNA
  ncRNA 1..19: ncRNA_class = siRNA
taccgcctgcgcctctact

SEQ ID NO: 15 - RNA, 19 nt, synthetic construct
  source 1..19: mol_type = other RNA
  ncRNA 1..19: ncRNA_class = siRNA
tctcctttggagctcgtcc

SEQ ID NO: 16 - RNA, 19 nt, synthetic construct
  source 1..19: mol_type = other RNA
  ncRNA 1..19: ncRNA_class = siRNA
ggacgagctccaaaggaga

SEQ ID NO: 17 - RNA, 19 nt, synthetic construct
  source 1..19: mol_type = other RNA
  ncRNA 1..19: ncRNA_class = siRNA
agaatccatcagcctcaca

SEQ ID NO: 18 - RNA, 19 nt, synthetic construct
  source 1..19: mol_type = other RNA
  ncRNA 1..19: ncRNA_class = siRNA
tgtgaggctgatggattct

SEQ ID NO: 19 - RNA, 19 nt, synthetic construct
  source 1..19: mol_type = other RNA
  ncRNA 1..19: ncRNA_class = siRNA
ggtcccaagatccatcttt

SEQ ID NO: 20 - RNA, 19 nt, synthetic construct
  source 1..19: mol_type = other RNA
  ncRNA 1..19: ncRNA_class = siRNA
aaagatggatcttgggacc

SEQ ID NO: 21 - RNA, 19 nt, synthetic construct
  source 1..19: mol_type = other RNA
  ncRNA 1..19: ncRNA_class = siRNA
gcattggccggtcccaaga

SEQ ID NO: 22 - RNA, 19 nt, synthetic construct
  source 1..19: mol_type = other RNA
  ncRNA 1..19: ncRNA_class = siRNA
tcttgggaccggccaatgc

SEQ ID NO: 23 - RNA, 19 nt, synthetic construct
  source 1..19: mol_type = other RNA
  ncRNA 1..19: ncRNA_class = siRNA
ccacaaacaggctcacaga

SEQ ID NO: 24 - RNA, 19 nt, synthetic construct
  source 1..19: mol_type = other RNA
  ncRNA 1..19: ncRNA_class = siRNA
tctgtgagcctgtttgtgg

SEQ ID NO: 25 - RNA, 19 nt, synthetic construct
  source 1..19: mol_type = other RNA
  ncRNA 1..19: ncRNA_class = siRNA
gtactgaatcacagctttg

SEQ ID NO: 26 - RNA, 19 nt, synthetic construct
  source 1..19: mol_type = other RNA
  ncRNA 1..19: ncRNA_class = siRNA
caaagctgtgattcagtac

SEQ ID NO: 27 - RNA, 19 nt, synthetic construct
  source 1..19: mol_type = other RNA
  ncRNA 1..19: ncRNA_class = siRNA
ctaagccagcacaaagcat

SEQ ID NO: 28 - RNA, 19 nt, synthetic construct
  source 1..19: mol_type = other RNA
  ncRNA 1..19: ncRNA_class = siRNA
atgctttgtgctggcttag

SEQ ID NO: 29 - RNA, 19 nt, synthetic construct
  source 1..19: mol_type = other RNA
  ncRNA 1..19: ncRNA_class = siRNA
ttcacagctgtactgaatc

SEQ ID NO: 30 - RNA, 19 nt, synthetic construct
  source 1..19: mol_type = other RNA
  ncRNA 1..19: ncRNA_class = siRNA
gattcagtacagctgtgaa

SEQ ID NO: 31 - RNA, 19 nt, synthetic construct
  source 1..19: mol_type = other RNA
  ncRNA 1..19: ncRNA_class = siRNA
taagccagcacaaagcatg

SEQ ID NO: 32 - RNA, 19 nt, synthetic construct
  source 1..19: mol_type = other RNA
  ncRNA 1..19: ncRNA_class = siRNA
catgctttgtgctggctta

SEQ ID NO: 33 - RNA, 19 nt, synthetic construct
  source 1..19: mol_type = other RNA
  ncRNA 1..19: ncRNA_class = siRNA
agtagtcggagcggaaggt

SEQ ID NO: 34 - RNA, 19 nt, synthetic construct
  source 1..19: mol_type = other RNA
  ncRNA 1..19: ncRNA_class = siRNA
accttccgctccgactact

SEQ ID NO: 35 - RNA, 19 nt, synthetic construct
  source 1..19: mol_type = other RNA
  ncRNA 1..19: ncRNA_class = siRNA
tctcgatccagggaatata

SEQ ID NO: 36 - RNA, 19 nt, synthetic construct
  source 1..19: mol_type = other RNA
  ncRNA 1..19: ncRNA_class = siRNA
tatattccctggatcgaga

SEQ ID NO: 37 - RNA, 19 nt, synthetic construct
  source 1..19: mol_type = other RNA
  ncRNA 1..19: ncRNA_class = siRNA
tcgaagtgggtgaagtaga

SEQ ID NO: 38 - RNA, 19 nt, synthetic construct
  source 1..19: mol_type = other RNA
  ncRNA 1..19: ncRNA_class = siRNA
tctacttcacccacttcga

SEQ ID NO: 39 - RNA, 19 nt, synthetic construct
  source 1..19: mol_type = other RNA
  ncRNA 1..19: ncRNA_class = siRNA
cttgccaaggaaaatcacc

SEQ ID NO: 40 - RNA, 19 nt, synthetic construct
  source 1..19: mol_type = other RNA
  ncRNA 1..19: ncRNA_class = siRNA
ggtgattttccttggcaag

SEQ ID NO: 41 - RNA, 19 nt, synthetic construct
  source 1..19: mol_type = other RNA
  ncRNA 1..19: ncRNA_class = siRNA
gcatgagcagctgttagga

SEQ ID NO: 42 - RNA, 19 nt, synthetic construct
  source 1..19: mol_type = other RNA
  ncRNA 1..19: ncRNA_class = siRNA
tcctaacagctgctcatgc

SEQ ID NO: 43 - RNA, 19 nt, synthetic construct
  source 1..19: mol_type = other RNA
  ncRNA 1..19: ncRNA_class = siRNA
ggacactattcctcccaca

SEQ ID NO: 44 - RNA, 19 nt, synthetic construct
  source 1..19: mol_type = other RNA
  ncRNA 1..19: ncRNA_class = siRNA
tgtgggaggaatagtgtcc

SEQ ID NO: 45 - RNA, 19 nt, synthetic construct
  source 1..19: mol_type = other RNA
  ncRNA 1..19: ncRNA_class = siRNA
tgtctccacatcgaaggac

SEQ ID NO: 46 - RNA, 19 nt, synthetic construct
  source 1..19: mol_type = other RNA
  ncRNA 1..19: ncRNA_class = siRNA
gtccttcgatgtggagaca

SEQ ID NO: 47 - RNA, 19 nt, synthetic construct
  source 1..19: mol_type = other RNA
  ncRNA 1..19: ncRNA_class = siRNA
gtgacaaaggtgatggtca

SEQ ID NO: 48 - RNA, 19 nt, synthetic construct
  source 1..19: mol_type = other RNA
  ncRNA 1..19: ncRNA_class = siRNA
tgaccatcacctttgtcac

SEQ ID NO: 49 - RNA, 19 nt, synthetic construct
  source 1..19: mol_type = other RNA
  ncRNA 1..19: ncRNA_class = siRNA
ctcttcacagctgtactga

SEQ ID NO: 50 - RNA, 19 nt, synthetic construct
  source 1..19: mol_type = other RNA
  ncRNA 1..19: ncRNA_class = siRNA
tcagtacagctgtgaagag

SEQ ID NO: 51 - RNA, 19 nt, synthetic construct
  source 1..19: mol_type = other RNA
  ncRNA 1..19: ncRNA_class = siRNA
aaggtctcttcacagctgt

SEQ ID NO: 52 - RNA, 19 nt, synthetic construct
  source 1..19: mol_type = other RNA
  ncRNA 1..19: ncRNA_class = siRNA
acagctgtgaagagacctt

SEQ ID NO: 53 - RNA, 19 nt, synthetic construct
  source 1..19: mol_type = other RNA
  ncRNA 1..19: ncRNA_class = siRNA
gcatagaaggcctcgaacc

SEQ ID NO: 54 - RNA, 19 nt, synthetic construct
  source 1..19: mol_type = other RNA
  ncRNA 1..19: ncRNA_class = siRNA
ggttcgaggccttctatgc

SEQ ID NO: 55 - RNA, 19 nt, synthetic construct
  source 1..19: mol_type = other RNA
  ncRNA 1..19: ncRNA_class = siRNA
gtagatcatcaggagggcc

SEQ ID NO: 56 - RNA, 19 nt, synthetic construct
  source 1..19: mol_type = other RNA
  ncRNA 1..19: ncRNA_class = siRNA
ggccctcctgatgatctac

SEQ ID NO: 57 - RNA, 19 nt, synthetic construct
  source 1..19: mol_type = other RNA
  ncRNA 1..19: ncRNA_class = siRNA
gaatcacagctttgtaggt

SEQ ID NO: 58 - RNA, 19 nt, synthetic construct
  source 1..19: mol_type = other RNA
  ncRNA 1..19: ncRNA_class = siRNA
acctacaaagctgtgattc

SEQ ID NO: 59 - RNA, 19 nt, synthetic construct
  source 1..19: mol_type = other RNA
  ncRNA 1..19: ncRNA_class = siRNA
aatcacagctttgtaggtg

SEQ ID NO: 60 - RNA, 19 nt, synthetic construct
  source 1..19: mol_type = other RNA
  ncRNA 1..19: ncRNA_class = siRNA
cacctacaaagctgtgatt

SEQ ID NO: 61 - RNA, 19 nt, synthetic construct
  source 1..19: mol_type = other RNA
  ncRNA 1..19: ncRNA_class = siRNA
ttaatcagtgctatgtcat

SEQ ID NO: 62 - RNA, 19 nt, synthetic construct
  source 1..19: mol_type = other RNA
  ncRNA 1..19: ncRNA_class = siRNA
atgacatagcactgattaa

SEQ ID NO: 63 - RNA, 19 nt, synthetic construct
  source 1..19: mol_type = other RNA
  ncRNA 1..19: ncRNA_class = siRNA
ttatgttctcgatccaggg

SEQ ID NO: 64 - RNA, 19 nt, synthetic construct
  source 1..19: mol_type = other RNA
  ncRNA 1..19: ncRNA_class = siRNA
ccctggatcgagaacataa

SEQ ID NO: 65 - RNA, 19 nt, synthetic construct
  source 1..19: mol_type = other RNA
  ncRNA 1..19: ncRNA_class = siRNA
ttgccaaggaaaatcacca

SEQ ID NO: 66 - RNA, 19 nt, synthetic construct
  source 1..19: mol_type = other RNA
  ncRNA 1..19: ncRNA_class = siRNA
tggtgattttccttggcaa

SEQ ID NO: 67 - RNA, 19 nt, synthetic construct
  source 1..19: mol_type = other RNA
  ncRNA 1..19: ncRNA_class = siRNA
cacaggttcaggccacttc

SEQ ID NO: 68 - RNA, 19 nt, synthetic construct
  source 1..19: mol_type = other RNA
  ncRNA 1..19: ncRNA_class = siRNA
gaagtggcctgaacctgtg

SEQ ID NO: 69 - RNA, 19 nt, synthetic construct
  source 1..19: mol_type = other RNA
  ncRNA 1..19: ncRNA_class = siRNA
cagcacaaagcatgttagc

SEQ ID NO: 70 - RNA, 19 nt, synthetic construct
  source 1..19: mol_type = other RNA
  ncRNA 1..19: ncRNA_class = siRNA
gctaacatgctttgtgctg

SEQ ID NO: 71 - RNA, 19 nt, synthetic construct
  source 1..19: mol_type = other RNA
  ncRNA 1..19: ncRNA_class = siRNA
cacatcgaaggactccaca

SEQ ID NO: 72 - RNA, 19 nt, synthetic construct
  source 1..19: mol_type = other RNA
  ncRNA 1..19: ncRNA_class = siRNA
tgtggagtccttcgatgtg

SEQ ID NO: 73 - RNA, 19 nt, synthetic construct
  source 1..19: mol_type = other RNA
  ncRNA 1..19: ncRNA_class = siRNA
ttgtgtagactccatactg

SEQ ID NO: 74 - RNA, 19 nt, synthetic construct
  source 1..19: mol_type = other RNA
  ncRNA 1..19: ncRNA_class = siRNA
cagtatggagtctacacaa

SEQ ID NO: 75 - RNA, 19 nt, synthetic construct
  source 1..19: mol_type = other RNA
  ncRNA 1..19: ncRNA_class = siRNA
cacaattcatggaacccca

SEQ ID NO: 76 - RNA, 19 nt, synthetic construct
  source 1..19: mol_type = other RNA
  ncRNA 1..19: ncRNA_class = siRNA
tggggttccatgaattgtg

SEQ ID NO: 77 - RNA, 19 nt, synthetic construct
  source 1..19: mol_type = other RNA
  ncRNA 1..19: ncRNA_class = siRNA
tccacaaacaggctcacag

SEQ ID NO: 78 - RNA, 19 nt, synthetic construct
  source 1..19: mol_type = other RNA
  ncRNA 1..19: ncRNA_class = siRNA
ctgtgagcctgtttgtgga

SEQ ID NO: 79 - RNA, 19 nt, synthetic construct
  source 1..19: mol_type = other RNA
  ncRNA 1..19: ncRNA_class = siRNA
acaggttcaggccacttcg

SEQ ID NO: 80 - RNA, 19 nt, synthetic construct
  source 1..19: mol_type = other RNA
  ncRNA 1..19: ncRNA_class = siRNA
cgaagtggcctgaacctgt

SEQ ID NO: 81 - RNA, 19 nt, synthetic construct
  source 1..19: mol_type = other RNA
  ncRNA 1..19: ncRNA_class = siRNA
ctgtactgaatcacagctt

SEQ ID NO: 82 - RNA, 19 nt, synthetic construct
  source 1..19: mol_type = other RNA
  ncRNA 1..19: ncRNA_class = siRNA
aagctgtgattcagtacag

SEQ ID NO: 83 - RNA, 19 nt, synthetic construct
  source 1..19: mol_type = other RNA
  ncRNA 1..19: ncRNA_class = siRNA
gtctccacatcgaaggact

SEQ ID NO: 84 - RNA, 19 nt, synthetic construct
  source 1..19: mol_type = other RNA
  ncRNA 1..19: ncRNA_class = siRNA
agtccttcgatgtggagac

SEQ ID NO: 85 - RNA, 19 nt, synthetic construct
  source 1..19: mol_type = other RNA
  ncRNA 1..19: ncRNA_class = siRNA
tcgtccagaatccatcagc

SEQ ID NO: 86 - RNA, 19 nt, synthetic construct
  source 1..19: mol_type = other RNA
  ncRNA 1..19: ncRNA_class = siRNA
gctgatggattctggacga

SEQ ID NO: 87 - RNA, 19 nt, synthetic construct
  source 1..19: mol_type = other RNA
  ncRNA 1..19: ncRNA_class = siRNA
cccaagatccatctttctg

SEQ ID NO: 88 - RNA, 19 nt, synthetic construct
  source 1..19: mol_type = other RNA
  ncRNA 1..19: ncRNA_class = siRNA
cagaaagatggatcttggg

SEQ ID NO: 89 - RNA, 19 nt, synthetic construct
  source 1..19: mol_type = other RNA
  ncRNA 1..19: ncRNA_class = siRNA
aagtgggtgaagtagaggc

SEQ ID NO: 90 - RNA, 19 nt, synthetic construct
  source 1..19: mol_type = other RNA
  ncRNA 1..19: ncRNA_class = siRNA
gcctctacttcacccactt

SEQ ID NO: 91 - RNA, 19 nt, synthetic construct
  source 1..19: mol_type = other RNA
  ncRNA 1..19: ncRNA_class = siRNA
cattagatttctagcaaga

SEQ ID NO: 92 - RNA, 19 nt, synthetic construct
  source 1..19: mol_type = other RNA
  ncRNA 1..19: ncRNA_class = siRNA
tcttgctagaaatctaatg

SEQ ID NO: 93 - RNA, 19 nt, synthetic construct
  source 1..19: mol_type = other RNA
  ncRNA 1..19: ncRNA_class = siRNA
ctccacatcgaaggactcc

SEQ ID NO: 94 - RNA, 19 nt, synthetic construct
  source 1..19: mol_type = other RNA
  ncRNA 1..19: ncRNA_class = siRNA
ggagtccttcgatgtggag

SEQ ID NO: 95 - RNA, 19 nt, synthetic construct
  source 1..19: mol_type = other RNA
  ncRNA 1..19: ncRNA_class = siRNA
cagctgtactgaatcacag

SEQ ID NO: 96 - RNA, 19 nt, synthetic construct
  source 1..19: mol_type = other RNA
  ncRNA 1..19: ncRNA_class = siRNA
ctgtgattcagtacagctg

SEQ ID NO: 97 - RNA, 19 nt, synthetic construct
  source 1..19: mol_type = other RNA
  ncRNA 1..19: ncRNA_class = siRNA
catgagcagctgttaggac

SEQ ID NO: 98 - RNA, 19 nt, synthetic construct
  source 1..19: mol_type = other RNA
  ncRNA 1..19: ncRNA_class = siRNA
gtcctaacagctgctcatg

SEQ ID NO: 99 - RNA, 19 nt, synthetic construct
  source 1..19: mol_type = other RNA
  ncRNA 1..19: ncRNA_class = siRNA
gtctgtttgaatcttgaga

SEQ ID NO: 100 - RNA, 19 nt, synthetic construct
  source 1..19: mol_type = other RNA
  ncRNA 1..19: ncRNA_class = siRNA
tctcaagattcaaacagac

SEQ ID NO: 101 - RNA, 19 nt, synthetic construct
  source 1..19: mol_type = other RNA
  ncRNA 1..19: ncRNA_class = siRNA
cctttggagctcgtccaga

SEQ ID NO: 102 - RNA, 19 nt, synthetic construct
  source 1..19: mol_type = other RNA
  ncRNA 1..19: ncRNA_class = siRNA
tctggacgagctccaaagg

SEQ ID NO: 103 - RNA, 19 nt, synthetic construct
  source 1..19: mol_type = other RNA
  ncRNA 1..19: ncRNA_class = siRNA
gctgttaggacccagttgt

SEQ ID NO: 104 - RNA, 19 nt, synthetic construct
  source 1..19: mol_type = other RNA
  ncRNA 1..19: ncRNA_class = siRNA
acaactgggtcctaacagc

SEQ ID NO: 105 - RNA, 19 nt, synthetic construct
  source 1..19: mol_type = other RNA
  ncRNA 1..19: ncRNA_class = siRNA
ggtagatcatcaggagggc

SEQ ID NO: 106 - RNA, 19 nt, synthetic construct
  source 1..19: mol_type = other RNA
  ncRNA 1..19: ncRNA_class = siRNA
gccctcctgatgatctacc

SEQ ID NO: 107 - RNA, 19 nt, synthetic construct
  source 1..19: mol_type = other RNA
  ncRNA 1..19: ncRNA_class = siRNA
gggtagatcatcaggaggg

SEQ ID NO: 108 - RNA, 19 nt, synthetic construct
  source 1..19: mol_type = other RNA
  ncRNA 1..19: ncRNA_class = siRNA
ccctcctgatgatctaccc

SEQ ID NO: 109 - RNA, 19 nt, synthetic construct
  source 1..19: mol_type = other RNA
  ncRNA 1..19: ncRNA_class = siRNA
tggcttgcacaggtgaaac

SEQ ID NO: 110 - RNA, 19 nt, synthetic construct
  source 1..19: mol_type = other RNA
  ncRNA 1..19: ncRNA_class = siRNA
gtttcacctgtgcaagcca

SEQ ID NO: 111 - RNA, 19 nt, synthetic construct
  source 1..19: mol_type = other RNA
  ncRNA 1..19: ncRNA_class = siRNA
ctattcctcccacaaacca

SEQ ID NO: 112 - RNA, 19 nt, synthetic construct
  source 1..19: mol_type = other RNA
  ncRNA 1..19: ncRNA_class = siRNA
tggtttgtgggaggaatag

SEQ ID NO: 113 - RNA, 19 nt, synthetic construct
  source 1..19: mol_type = other RNA
  ncRNA 1..19: ncRNA_class = siRNA
gagtagtcggagcggaagg

SEQ ID NO: 114 - RNA, 19 nt, synthetic construct
  source 1..19: mol_type = other RNA
  ncRNA 1..19: ncRNA_class = siRNA
ccttccgctccgactactc

SEQ ID NO: 115 - RNA, 19 nt, synthetic construct
  source 1..19: mol_type = other RNA
  ncRNA 1..19: ncRNA_class = siRNA
gatccagggaatatagtta

SEQ ID NO: 116 - RNA, 19 nt, synthetic construct
  source 1..19: mol_type = other RNA
  ncRNA 1..19: ncRNA_class = siRNA
taactatattccctggatc

SEQ ID NO: 117 - RNA, 19 nt, synthetic construct
  source 1..19: mol_type = other RNA
  ncRNA 1..19: ncRNA_class = siRNA
attagatttctagcaagaa

SEQ ID NO: 118 - RNA, 19 nt, synthetic construct
  source 1..19: mol_type = other RNA
  ncRNA 1..19: ncRNA_class = siRNA
ttcttgctagaaatctaat

SEQ ID NO: 119 - RNA, 19 nt, synthetic construct
  source 1..19: mol_type = other RNA
  ncRNA 1..19: ncRNA_class = siRNA
gttaggacccagttgtcat

SEQ ID NO: 120 - RNA, 19 nt, synthetic construct
  source 1..19: mol_type = other RNA
  ncRNA 1..19: ncRNA_class = siRNA
atgacaactgggtcctaac

SEQ ID NO: 121 - RNA, 19 nt, synthetic construct
  source 1..19: mol_type = other RNA
  ncRNA 1..19: ncRNA_class = siRNA
atccagggaatatagttaa

SEQ ID NO: 122 - RNA, 19 nt, synthetic construct
  source 1..19: mol_type = other RNA
  ncRNA 1..19: ncRNA_class = siRNA
ttaactatattccctggat

SEQ ID NO: 123 - RNA, 19 nt, synthetic construct
  source 1..19: mol_type = other RNA
  ncRNA 1..19: ncRNA_class = siRNA
aagtccagaatgacactga

SEQ ID NO: 124 - RNA, 19 nt, synthetic construct
  source 1..19: mol_type = other RNA
  ncRNA 1..19: ncRNA_class = siRNA
tcagtgtcattctggactt

SEQ ID NO: 125 - RNA, 19 nt, synthetic construct
  source 1..19: mol_type = other RNA
  ncRNA 1..19: ncRNA_class = siRNA
acatttttgatggtcaaca

SEQ ID NO: 126 - RNA, 19 nt, synthetic construct
  source 1..19: mol_type = other RNA
  ncRNA 1..19: ncRNA_class = siRNA
tgttgaccatcaaaaatgt

SEQ ID NO: 127 - RNA, 19 nt, synthetic construct
  source 1..19: mol_type = other RNA
  ncRNA 1..19: ncRNA_class = siRNA
gagctcgtccagaatccat

SEQ ID NO: 128 - RNA, 19 nt, synthetic construct
  source 1..19: mol_type = other RNA
  ncRNA 1..19: ncRNA_class = siRNA
atggattctggacgagctc

SEQ ID NO: 129 - RNA, 19 nt, synthetic construct
  source 1..19: mol_type = other RNA
  ncRNA 1..19: ncRNA_class = siRNA
gtgtagaaggtctcttcac

SEQ ID NO: 130 - RNA, 19 nt, synthetic construct
  source 1..19: mol_type = other RNA
  ncRNA 1..19: ncRNA_class = siRNA
gtgaagagaccttctacac

SEQ ID NO: 131 - RNA, 19 nt, synthetic construct
  source 1..19: mol_type = other RNA
  ncRNA 1..19: ncRNA_class = siRNA
cactattcctcccacaaac

SEQ ID NO: 132 - RNA, 19 nt, synthetic construct
  source 1..19: mol_type = other RNA
  ncRNA 1..19: ncRNA_class = siRNA
gtttgtgggaggaatagtg

SEQ ID NO: 133 - RNA, 19 nt, synthetic construct
  source 1..19: mol_type = other RNA
  ncRNA 1..19: ncRNA_class = siRNA
acactattcctcccacaaa

SEQ ID NO: 134 - RNA, 19 nt, synthetic construct
  source 1..19: mol_type = other RNA
  ncRNA 1..19: ncRNA_class = siRNA
tttgtgggaggaatagtgt

SEQ ID NO: 135 - RNA, 19 nt, synthetic construct
  source 1..19: mol_type = other RNA
  ncRNA 1..19: ncRNA_class = siRNA
tgtactgaatcacagcttt

SEQ ID NO: 136 - RNA, 19 nt, synthetic construct
  source 1..19: mol_type = other RNA
  ncRNA 1..19: ncRNA_class = siRNA
aaagctgtgattcagtaca

SEQ ID NO: 137 - RNA, 19 nt, synthetic construct
  source 1..19: mol_type = other RNA
  ncRNA 1..19: ncRNA_class = siRNA
aaccccaggacactattcc

SEQ ID NO: 138 - RNA, 19 nt, synthetic construct
  source 1..19: mol_type = other RNA
  ncRNA 1..19: ncRNA_class = siRNA
ggaatagtgtcctggggtt

SEQ ID NO: 139 - RNA, 19 nt, synthetic construct
  source 1..19: mol_type = other RNA
  ncRNA 1..19: ncRNA_class = siRNA
ctttggagctcgtccagaa

SEQ ID NO: 140 - RNA, 19 nt, synthetic construct
  source 1..19: mol_type = other RNA
  ncRNA 1..19: ncRNA_class = siRNA
ttctggacgagctccaaag

SEQ ID NO: 141 - RNA, 19 nt, synthetic construct
  source 1..19: mol_type = other RNA
  ncRNA 1..19: ncRNA_class = siRNA
tagtggatcttccagcctg

SEQ ID NO: 142 - RNA, 19 nt, synthetic construct
  source 1..19: mol_type = other RNA
  ncRNA 1..19: ncRNA_class = siRNA
caggctggaagatccacta

SEQ ID NO: 143 - RNA, 19 nt, synthetic construct
  source 1..19: mol_type = other RNA
  ncRNA 1..19: ncRNA_class = siRNA
gacactattcctcccacaa

SEQ ID NO: 144 - RNA, 19 nt, synthetic construct
  source 1..19: mol_type = other RNA
  ncRNA 1..19: ncRNA_class = siRNA
ttgtgggaggaatagtgtc

SEQ ID NO: 145 - RNA, 19 nt, synthetic construct
  source 1..19: mol_type = other RNA
  ncRNA 1..19: ncRNA_class = siRNA
acattagatttctagcaag

SEQ ID NO: 146 - RNA, 19 nt, synthetic construct
  source 1..19: mol_type = other RNA
  ncRNA 1..19: ncRNA_class = siRNA
cttgctagaaatctaatgt

SEQ ID NO: 147 - RNA, 19 nt, synthetic construct
  source 1..19: mol_type = other RNA
  ncRNA 1..19: ncRNA_class = siRNA
tctcgttggagtagtcgga

SEQ ID NO: 148 - RNA, 19 nt, synthetic construct
  source 1..19: mol_type = other RNA
  ncRNA 1..19: ncRNA_class = siRNA
tccgactactccaacgaga

SEQ ID NO: 149 - RNA, 19 nt, synthetic construct
  source 1..19: mol_type = other RNA
  ncRNA 1..19: ncRNA_class = siRNA
cacagctgtactgaatcac

SEQ ID NO: 150 - RNA, 19 nt, synthetic construct
  source 1..19: mol_type = other RNA
  ncRNA 1..19: ncRNA_class = siRNA
gtgattcagtacagctgtg

SEQ ID NO: 151 - RNA, 19 nt, synthetic construct
  source 1..19: mol_type = other RNA
  ncRNA 1..19: ncRNA_class = siRNA
tgtctgtttgaatcttgag

SEQ ID NO: 152 - RNA, 19 nt, synthetic construct
  source 1..19: mol_type = other RNA
  ncRNA 1..19: ncRNA_class = siRNA
ctcaagattcaaacagaca

SEQ ID NO: 153 - RNA, 19 nt, synthetic construct
  source 1..19: mol_type = other RNA
  ncRNA 1..19: ncRNA_class = siRNA
actgaatcacagctttgta

SEQ ID NO: 154 - RNA, 19 nt, synthetic construct
  source 1..19: mol_type = other RNA
  ncRNA 1..19: ncRNA_class = siRNA
tacaaagctgtgattcagt

SEQ ID NO: 155 - RNA, 19 nt, synthetic construct
  source 1..19: mol_type = other RNA
  ncRNA 1..19: ncRNA_class = siRNA
gtccagaatccatcagcct

SEQ ID NO: 156 - RNA, 19 nt, synthetic construct
  source 1..19: mol_type = other RNA
  ncRNA 1..19: ncRNA_class = siRNA
aggctgatggattctggac

SEQ ID NO: 157 - RNA, 19 nt, synthetic construct
  source 1..19: mol_type = other RNA
  ncRNA 1..19: ncRNA_class = siRNA
acttgccaaggaaaatcac

SEQ ID NO: 158 - RNA, 19 nt, synthetic construct
  source 1..19: mol_type = other RNA
  ncRNA 1..19: ncRNA_class = siRNA
gtgattttccttggcaagt

SEQ ID NO: 159 - RNA, 19 nt, synthetic construct
  source 1..19: mol_type = other RNA
  ncRNA 1..19: ncRNA_class = siRNA
tcacagctgtactgaatca

SEQ ID NO: 160 - RNA, 19 nt, synthetic construct
  source 1..19: mol_type = other RNA
  ncRNA 1..19: ncRNA_class = siRNA
tgattcagtacagctgtga

SEQ ID NO: 161 - RNA, 19 nt, synthetic construct
  source 1..19: mol_type = other RNA
  ncRNA 1..19: ncRNA_class = siRNA
agctcgtccagaatccatc

SEQ ID NO: 162 - RNA, 19 nt, synthetic construct
  source 1..19: mol_type = other RNA
  ncRNA 1..19: ncRNA_class = siRNA
gatggattctggacgagct

SEQ ID NO: 163 - RNA, 19 nt, synthetic construct
  source 1..19: mol_type = other RNA
  ncRNA 1..19: ncRNA_class = siRNA
atcttccagcctgtgtggt

SEQ ID NO: 164 - RNA, 19 nt, synthetic construct
  source 1..19: mol_type = other RNA
  ncRNA 1..19: ncRNA_class = siRNA
accacacaggctggaagat

SEQ ID NO: 165 - RNA, 19 nt, synthetic construct
  source 1..19: mol_type = other RNA
  ncRNA 1..19: ncRNA_class = siRNA
tggagtagtcggagcggaa

SEQ ID NO: 166 - RNA, 19 nt, synthetic construct
  source 1..19: mol_type = other RNA
  ncRNA 1..19: ncRNA_class = siRNA
ttccgctccgactactcca

SEQ ID NO: 167 - RNA, 19 nt, synthetic construct
  source 1..19: mol_type = other RNA
  ncRNA 1..19: ncRNA_class = siRNA
ctcgatccagggaatatag

SEQ ID NO: 168 - RNA, 19 nt, synthetic construct
  source 1..19: mol_type = other RNA
  ncRNA 1..19: ncRNA_class = siRNA
ctatattccctggatcgag

SEQ ID NO: 169 - RNA, 19 nt, synthetic construct
  source 1..19: mol_type = other RNA
  ncRNA 1..19: ncRNA_class = siRNA
tactgaatcacagctttgt

SEQ ID NO: 170 - RNA, 19 nt, synthetic construct
  source 1..19: mol_type = other RNA
  ncRNA 1..19: ncRNA_class = siRNA
acaaagctgtgattcagta

SEQ ID NO: 171 - RNA, 19 nt, synthetic construct
  source 1..19: mol_type = other RNA
  ncRNA 1..19: ncRNA_class = siRNA
tccagaatccatcagcctc

SEQ ID NO: 172 - RNA, 19 nt, synthetic construct
  source 1..19: mol_type = other RNA
  ncRNA 1..19: ncRNA_class = siRNA
gaggctgatggattctgga

SEQ ID NO: 173 - RNA, 19 nt, synthetic construct
  source 1..19: mol_type = other RNA
  ncRNA 1..19: ncRNA_class = siRNA
aaggattcagcttcttttc

SEQ ID NO: 174 - RNA, 19 nt, synthetic construct
  source 1..19: mol_type = other RNA
  ncRNA 1..19: ncRNA_class = siRNA
gaaaagaagctgaatcctt

SEQ ID NO: 175 - RNA, 19 nt, synthetic construct
  source 1..19: mol_type = other RNA
  ncRNA 1..19: ncRNA_class = siRNA
tgaatcacagctttgtagg

SEQ ID NO: 176 - RNA, 19 nt, synthetic construct
  source 1..19: mol_type = other RNA
  ncRNA 1..19: ncRNA_class = siRNA
cctacaaagctgtgattca

SEQ ID NO: 177 - RNA, 19 nt, synthetic construct
  source 1..19: mol_type = other RNA
  ncRNA 1..19: ncRNA_class = siRNA
gtgggtgaagtagaggcgc

SEQ ID NO: 178 - RNA, 19 nt, synthetic construct
  source 1..19: mol_type = other RNA
  ncRNA 1..19: ncRNA_class = siRNA
gcgcctctacttcacccac

SEQ ID NO: 179 - RNA, 19 nt, synthetic construct
  source 1..19: mol_type = other RNA
  ncRNA 1..19: ncRNA_class = siRNA
ccagaatccatcagcctca

SEQ ID NO: 180 - RNA, 19 nt, synthetic construct
  source 1..19: mol_type = other RNA
  ncRNA 1..19: ncRNA_class = siRNA
tgaggctgatggattctgg

SEQ ID NO: 181 - RNA, 19 nt, synthetic construct
  source 1..19: mol_type = other RNA
  ncRNA 1..19: ncRNA_class = siRNA
cattgtgtagaaggtctct

SEQ ID NO: 182 - RNA, 19 nt, synthetic construct
  source 1..19: mol_type = other RNA
  ncRNA 1..19: ncRNA_class = siRNA
agagaccttctacacaatg

SEQ ID NO: 183 - RNA, 19 nt, synthetic construct
  source 1..19: mol_type = other RNA
  ncRNA 1..19: ncRNA_class = siRNA
tttggcttgcacaggtgaa

SEQ ID NO: 184 - RNA, 19 nt, synthetic construct
  source 1..19: mol_type = other RNA
  ncRNA 1..19: ncRNA_class = siRNA
ttcacctgtgcaagccaaa

SEQ ID NO: 185 - RNA, 19 nt, synthetic construct
  source 1..19: mol_type = other RNA
  ncRNA 1..19: ncRNA_class = siRNA
caattcatggaaccccagg

SEQ ID NO: 186 - RNA, 19 nt, synthetic construct
  source 1..19: mol_type = other RNA
  ncRNA 1..19: ncRNA_class = siRNA
cctggggttccatgaattg

SEQ ID NO: 187 - RNA, 19 nt, synthetic construct
  source 1..19: mol_type = other RNA
  ncRNA 1..19: ncRNA_class = siRNA
cttcacagctgtactgaat

SEQ ID NO: 188 - RNA, 19 nt, synthetic construct
  source 1..19: mol_type = other RNA
  ncRNA 1..19: ncRNA_class = siRNA
attcagtacagctgtgaag

SEQ ID NO: 189 - RNA, 19 nt, synthetic construct
  source 1..19: mol_type = other RNA
  ncRNA 1..19: ncRNA_class = siRNA
gctgcatagaaggcctcga

SEQ ID NO: 190 - RNA, 19 nt, synthetic construct
  source 1..19: mol_type = other RNA
  ncRNA 1..19: ncRNA_class = siRNA
tcgaggccttctatgcagc

SEQ ID NO: 191 - RNA, 19 nt, synthetic construct
  source 1..19: mol_type = other RNA
  ncRNA 1..19: ncRNA_class = siRNA
gaatccatcagcctcacac

SEQ ID NO: 192 - RNA, 19 nt, synthetic construct
  source 1..19: mol_type = other RNA
  ncRNA 1..19: ncRNA_class = siRNA
gtgtgaggctgatggattc

SEQ ID NO: 193 - RNA, 19 nt, synthetic construct
  source 1..19: mol_type = other RNA
  ncRNA 1..19: ncRNA_class = siRNA
aatccatcagcctcacaca

SEQ ID NO: 194 - RNA, 19 nt, synthetic construct
  source 1..19: mol_type = other RNA
  ncRNA 1..19: ncRNA_class = siRNA
tgtgtgaggctgatggatt

SEQ ID NO: 195 - RNA, 19 nt, synthetic construct
  source 1..19: mol_type = other RNA
  ncRNA 1..19: ncRNA_class = siRNA
agtgggtgaagtagaggcg

SEQ ID NO: 196 - RNA, 19 nt, synthetic construct
  source 1..19: mol_type = other RNA
  ncRNA 1..19: ncRNA_class = siRNA
cgcctctacttcacccact

SEQ ID NO: 197 - RNA, 19 nt, synthetic construct
  source 1..19: mol_type = other RNA
  ncRNA 1..19: ncRNA_class = siRNA
ctcgtccagaatccatcag

SEQ ID NO: 198 - RNA, 19 nt, synthetic construct
  source 1..19: mol_type = other RNA
  ncRNA 1..19: ncRNA_class = siRNA
ctgatggattctggacgag

SEQ ID NO: 199 - RNA, 19 nt, synthetic construct
  source 1..19: mol_type = other RNA
  ncRNA 1..19: ncRNA_class = siRNA
ttggagtagtcggagcgga

SEQ ID NO: 200 - RNA, 19 nt, synthetic construct
  source 1..19: mol_type = other RNA
  ncRNA 1..19: ncRNA_class = siRNA
tccgctccgactactccaa

SEQ ID NO: 201 - RNA, 19 nt, synthetic construct
  source 1..19: mol_type = other RNA
  ncRNA 1..19: ncRNA_class = siRNA
acaattcatggaaccccag

SEQ ID NO: 202 - RNA, 19 nt, synthetic construct
  source 1..19: mol_type = other RNA
  ncRNA 1..19: ncRNA_class = siRNA
ctggggttccatgaattgt

SEQ ID NO: 203 - RNA, 19 nt, synthetic construct
  source 1..19: mol_type = other RNA
  ncRNA 1..19: ncRNA_class = siRNA
ggtctcttcacagctgtac

SEQ ID NO: 204 - RNA, 19 nt, synthetic construct
  source 1..19: mol_type = other RNA
  ncRNA 1..19: ncRNA_class = siRNA
gtacagctgtgaagagacc

SEQ ID NO: 205 - RNA, 19 nt, synthetic construct
  source 1..19: mol_type = other RNA
  ncRNA 1..19: ncRNA_class = siRNA
acagctgtactgaatcaca

SEQ ID NO: 206 - RNA, 19 nt, synthetic construct
  source 1..19: mol_type = other RNA
  ncRNA 1..19: ncRNA_class = siRNA
tgtgattcagtacagctgt

SEQ ID NO: 207 - RNA, 19 nt, synthetic construct
  source 1..19: mol_type = other RNA
  ncRNA 1..19: ncRNA_class = siRNA
cgatccagggaatatagtt

SEQ ID NO: 208 - RNA, 19 nt, synthetic construct
  source 1..19: mol_type = other RNA
  ncRNA 1..19: ncRNA_class = siRNA
aactatattccctggatcg

SEQ ID NO: 209 - RNA, 19 nt, synthetic construct
  source 1..19: mol_type = other RNA
  ncRNA 1..19: ncRNA_class = siRNA
ctcctttggagctcgtcca

SEQ ID NO: 210 - RNA, 19 nt, synthetic construct
  source 1..19: mol_type = other RNA
  ncRNA 1..19: ncRNA_class = siRNA
tggacgagctccaaaggag

SEQ ID NO: 211 - RNA, 19 nt, synthetic construct
  source 1..19: mol_type = other RNA
  ncRNA 1..19: ncRNA_class = siRNA
tagatcatcaggagggcca

SEQ ID NO: 212 - RNA, 19 nt, synthetic construct
  source 1..19: mol_type = other RNA
  ncRNA 1..19: ncRNA_class = siRNA
tggccctcctgatgatcta

SEQ ID NO: 213 - RNA, 19 nt, synthetic construct
  source 1..19: mol_type = other RNA
  ncRNA 1..19: ncRNA_class = siRNA
ccacaattcatggaacccc

SEQ ID NO: 214 - RNA, 19 nt, synthetic construct
  source 1..19: mol_type = other RNA
  ncRNA 1..19: ncRNA_class = siRNA
ggggttccatgaattgtgg

SEQ ID NO: 215 - RNA, 19 nt, synthetic construct
  source 1..19: mol_type = other RNA
  ncRNA 1..19: ncRNA_class = siRNA
catagaaggcctcgaaccc

SEQ ID NO: 216 - RNA, 19 nt, synthetic construct
  source 1..19: mol_type = other RNA
  ncRNA 1..19: ncRNA_class = siRNA
gggttcgaggccttctatg

SEQ ID NO: 217 - RNA, 19 nt, synthetic construct
  source 1..19: mol_type = other RNA
  ncRNA 1..19: ncRNA_class = siRNA
ttggagctcgtccagaatc

SEQ ID NO: 218 - RNA, 19 nt, synthetic construct
  source 1..19: mol_type = other RNA
  ncRNA 1..19: ncRNA_class = siRNA
gattctggacgagctccaa

SEQ ID NO: 219 - RNA, 19 nt, synthetic construct
  source 1..19: mol_type = other RNA
  ncRNA 1..19: ncRNA_class = siRNA
ttctcgttggagtagtcgg

SEQ ID NO: 220 - RNA, 19 nt, synthetic construct
  source 1..19: mol_type = other RNA
  ncRNA 1..19: ncRNA_class = siRNA
ccgactactccaacgagaa

SEQ ID NO: 221 - RNA, 19 nt, synthetic construct
  source 1..19: mol_type = other RNA
  ncRNA 1..19: ncRNA_class = siRNA
atgttctcgatccagggaa

SEQ ID NO: 222 - RNA, 19 nt, synthetic construct
  source 1..19: mol_type = other RNA
  ncRNA 1..19: ncRNA_class = siRNA
ttccctggatcgagaacat

SEQ ID NO: 223 - RNA, 19 nt, synthetic construct
  source 1..19: mol_type = other RNA
  ncRNA 1..19: ncRNA_class = siRNA
aggtgcgcttgttacggtg

SEQ ID NO: 224 - RNA, 19 nt, synthetic construct
  source 1..19: mol_type = other RNA
  ncRNA 1..19: ncRNA_class = siRNA
caccgtaacaagcgcacct

SEQ ID NO: 225 - RNA, 19 nt, synthetic construct
  source 1..19: mol_type = other RNA
  ncRNA 1..19: ncRNA_class = siRNA
cctccatatatacgccctc

SEQ ID NO: 226 - RNA, 19 nt, synthetic construct
  source 1..19: mol_type = other RNA
  ncRNA 1..19: ncRNA_class = siRNA
gagggcgtatatatggagg

SEQ ID NO: 227 - RNA, 19 nt, synthetic construct
  source 1..19: mol_type = other RNA
  ncRNA 1..19: ncRNA_class = siRNA
tgctatgtcattgtcaaag

SEQ ID NO: 228 - RNA, 19 nt, synthetic construct
  source 1..19: mol_type = other RNA
  ncRNA 1..19: ncRNA_class = siRNA
ctttgacaatgacatagca

SEQ ID NO: 229 - RNA, 19 nt, synthetic construct
  source 1..19: mol_type = other RNA
  ncRNA 1..19: ncRNA_class = siRNA
aaaatcaccaggttttgcc

SEQ ID NO: 230 - RNA, 19 nt, synthetic construct
  source 1..19: mol_type = other RNA
  ncRNA 1..19: ncRNA_class = siRNA
ggcaaaacctggtgatttt

SEQ ID NO: 231 - RNA, 19 nt, synthetic construct
  source 1..19: mol_type = other RNA
  ncRNA 1..19: ncRNA_class = siRNA
ctcataaaggattcagctt

SEQ ID NO: 232 - RNA, 19 nt, synthetic construct
  source 1..19: mol_type = other RNA
  ncRNA 1..19: ncRNA_class = siRNA
aagctgaatcctttatgag

SEQ ID NO: 233 - RNA, 19 nt, synthetic construct
  source 1..19: mol_type = other RNA
  ncRNA 1..19: ncRNA_class = siRNA
ttcatatgcagcagtacat

SEQ ID NO: 234 - RNA, 19 nt, synthetic construct
  source 1..19: mol_type = other RNA
  ncRNA 1..19: ncRNA_class = siRNA
atgtactgctgcatatgaa

SEQ ID NO: 235 - RNA, 19 nt, synthetic construct
  source 1..19: mol_type = other RNA
  ncRNA 1..19: ncRNA_class = siRNA
ttgacgaagtcgtactcgc

SEQ ID NO: 236 - RNA, 19 nt, synthetic construct
  source 1..19: mol_type = other RNA
  ncRNA 1..19: ncRNA_class = siRNA
gcgagtacgacttcgtcaa

SEQ ID NO: 237 - RNA, 19 nt, synthetic construct
  source 1..19: mol_type = other RNA
  ncRNA 1..19: ncRNA_class = siRNA
tagtcggagcggaaggtaa

SEQ ID NO: 238 - RNA, 19 nt, synthetic construct
  source 1..19: mol_type = other RNA
  ncRNA 1..19: ncRNA_class = siRNA
ttaccttccgctccgacta

SEQ ID NO: 239 - RNA, 19 nt, synthetic construct
  source 1..19: mol_type = other RNA
  ncRNA 1..19: ncRNA_class = siRNA
tgatagtccacaaacaggc

SEQ ID NO: 240 - RNA, 19 nt, synthetic construct
  source 1..19: mol_type = other RNA
  ncRNA 1..19: ncRNA_class = siRNA
gcctgtttgtggactatca

SEQ ID NO: 241 - RNA, 19 nt, synthetic construct
  source 1..19: mol_type = other RNA
  ncRNA 1..19: ncRNA_class = siRNA
gtcttcacaggcatttcta

SEQ ID NO: 242 - RNA, 19 nt, synthetic construct
  source 1..19: mol_type = other RNA
  ncRNA 1..19: ncRNA_class = siRNA
tagaaatgcctgtgaagac

SEQ ID NO: 243 - RNA, 19 nt, synthetic construct
  source 1..19: mol_type = other RNA
  ncRNA 1..19: ncRNA_class = siRNA
tgaatcttgagaaagtcgt

SEQ ID NO: 244 - RNA, 19 nt, synthetic construct
  source 1..19: mol_type = other RNA
  ncRNA 1..19: ncRNA_class = siRNA
acgactttctcaagattca

SEQ ID NO: 245 - RNA, 19 nt, synthetic construct
  source 1..19: mol_type = other RNA
  ncRNA 1..19: ncRNA_class = siRNA
tcggagcggaaggtaatgt

SEQ ID NO: 246 - RNA, 19 nt, synthetic construct
  source 1..19: mol_type = other RNA
  ncRNA 1..19: ncRNA_class = siRNA
acattaccttccgctccga

SEQ ID NO: 247 - RNA, 19 nt, synthetic construct
  source 1..19: mol_type = other RNA
  ncRNA 1..19: ncRNA_class = siRNA
cacctggagtctgtttttt

SEQ ID NO: 248 - RNA, 19 nt, synthetic construct
  source 1..19: mol_type = other RNA
  ncRNA 1..19: ncRNA_class = siRNA
aaaaaacagactccaggtg

SEQ ID NO: 249 - RNA, 19 nt, synthetic construct
  source 1..19: mol_type = other RNA
  ncRNA 1..19: ncRNA_class = siRNA
ttattcaatttaatcagtg

SEQ ID NO: 250 - RNA, 19 nt, synthetic construct
  source 1..19: mol_type = other RNA
  ncRNA 1..19: ncRNA_class = siRNA
cactgattaaattgaataa

SEQ ID NO: 251 - RNA, 19 nt, synthetic construct
  source 1..19: mol_type = other RNA
  ncRNA 1..19: ncRNA_class = siRNA
aaaggattcagcttctttt

SEQ ID NO: 252 - RNA, 19 nt, synthetic construct
  source 1..19: mol_type = other RNA
  ncRNA 1..19: ncRNA_class = siRNA
aaaagaagctgaatccttt

SEQ ID NO: 253 - RNA, 19 nt, synthetic construct
  source 1..19: mol_type = other RNA
  ncRNA 1..19: ncRNA_class = siRNA
gtagtcggagcggaaggta

SEQ ID NO: 254 - RNA, 19 nt, synthetic construct
  source 1..19: mol_type = other RNA
  ncRNA 1..19: ncRNA_class = siRNA
taccttccgctccgactac

SEQ ID NO: 255 - RNA, 19 nt, synthetic construct
  source 1..19: mol_type = other RNA
  ncRNA 1..19: ncRNA_class = siRNA
agtcggagcggaaggtaat

SEQ ID NO: 256 - RNA, 19 nt, synthetic construct
  source 1..19: mol_type = other RNA
  ncRNA 1..19: ncRNA_class = siRNA
attaccttccgctccgact

SEQ ID NO: 257 - RNA, 19 nt, synthetic construct
  source 1..19: mol_type = other RNA
  ncRNA 1..19: ncRNA_class = siRNA
catataaaagtgcacctgc

SEQ ID NO: 258 - RNA, 19 nt, synthetic construct
  source 1..19: mol_type = other RNA
  ncRNA 1..19: ncRNA_class = siRNA
gcaggtgcacttttatatg

SEQ ID NO: 259 - RNA, 19 nt, synthetic construct
  source 1..19: mol_type = other RNA
  ncRNA 1..19: ncRNA_class = siRNA
catatatacgccctcctgt

SEQ ID NO: 260 - RNA, 19 nt, synthetic construct
  source 1..19: mol_type = other RNA
  ncRNA 1..19: ncRNA_class = siRNA
acaggagggcgtatatatg

SEQ ID NO: 261 - RNA, 19 nt, synthetic construct
  source 1..19: mol_type = other RNA
  ncRNA 1..19: ncRNA_class = siRNA
tccatatatacgccctcct

SEQ ID NO: 262 - RNA, 19 nt, synthetic construct
  source 1..19: mol_type = other RNA
  ncRNA 1..19: ncRNA_class = siRNA
aggagggcgtatatatgga

SEQ ID NO: 263 - RNA, 19 nt, synthetic construct
  source 1..19: mol_type = other RNA
  ncRNA 1..19: ncRNA_class = siRNA
tattgattacaactttgtt

SEQ ID NO: 264 - RNA, 19 nt, synthetic construct
  source 1..19: mol_type = other RNA
  ncRNA 1..19: ncRNA_class = siRNA
aacaaagttgtaatcaata

SEQ ID NO: 265 - RNA, 19 nt, synthetic construct
  source 1..19: mol_type = other RNA
  ncRNA 1..19: ncRNA_class = siRNA
tacaactttgttattcaat

SEQ ID NO: 266 - RNA, 19 nt, synthetic construct
  source 1..19: mol_type = other RNA
  ncRNA 1..19: ncRNA_class = siRNA
attgaataacaaagttgta

SEQ ID NO: 267 - RNA, 19 nt, synthetic construct
  source 1..19: mol_type = other RNA
  ncRNA 1..19: ncRNA_class = siRNA
ttgccttttgccctccata

SEQ ID NO: 268 - RNA, 19 nt, synthetic construct
  source 1..19: mol_type = other RNA
  ncRNA 1..19: ncRNA_class = siRNA
tatggagggcaaaaggcaa

SEQ ID NO: 269 - RNA, 19 nt, synthetic construct
  source 1..19: mol_type = other RNA
  ncRNA 1..19: ncRNA_class = siRNA
taatatcaggacttgccaa

SEQ ID NO: 270 - RNA, 19 nt, synthetic construct
  source 1..19: mol_type = other RNA
  ncRNA 1..19: ncRNA_class = siRNA
ttggcaagtcctgatatta

SEQ ID NO: 271 - RNA, 19 nt, synthetic construct
  source 1..19: mol_type = other RNA
  ncRNA 1..19: ncRNA_class = siRNA
tcgtagggacacagggttt

SEQ ID NO: 272 - RNA, 19 nt, synthetic construct
  source 1..19: mol_type = other RNA
  ncRNA 1..19: ncRNA_class = siRNA
aaaccctgtgtccctacga

SEQ ID NO: 273 - RNA, 19 nt, synthetic construct
  source 1..19: mol_type = other RNA
  ncRNA 1..19: ncRNA_class = siRNA
tcgtcaatgtcctcggctg

SEQ ID NO: 274 - RNA, 19 nt, synthetic construct
  source 1..19: mol_type = other RNA
  ncRNA 1..19: ncRNA_class = siRNA
cagccgaggacattgacga

SEQ ID NO: 275 - RNA, 19 nt, synthetic construct
  source 1..19: mol_type = other RNA
  ncRNA 1..19: ncRNA_class = siRNA
ccctccatatatacgccct

SEQ ID NO: 276 - RNA, 19 nt, synthetic construct
  source 1..19: mol_type = other RNA
  ncRNA 1..19: ncRNA_class = siRNA
agggcgtatatatggaggg

SEQ ID NO: 277 - RNA, 19 nt, synthetic construct
  source 1..19: mol_type = other RNA
  ncRNA 1..19: ncRNA_class = siRNA
tccagaatgacactgaacc

SEQ ID NO: 278 - RNA, 19 nt, synthetic construct
  source 1..19: mol_type = other RNA
  ncRNA 1..19: ncRNA_class = siRNA
ggttcagtgtcattctgga

SEQ ID NO: 279 - RNA, 19 nt, synthetic construct
  source 1..19: mol_type = other RNA
  ncRNA 1..19: ncRNA_class = siRNA
aaagccagcatcatgagta

SEQ ID NO: 280 - RNA, 19 nt, synthetic construct
  source 1..19: mol_type = other RNA
  ncRNA 1..19: ncRNA_class = siRNA
tactcatgatgctggcttt

SEQ ID NO: 281 - RNA, 19 nt, synthetic construct
  source 1..19: mol_type = other RNA
  ncRNA 1..19: ncRNA_class = siRNA
atatacgccctcctgttgt

SEQ ID NO: 282 - RNA, 19 nt, synthetic construct
  source 1..19: mol_type = other RNA
  ncRNA 1..19: ncRNA_class = siRNA
acaacaggagggcgtatat

SEQ ID NO: 283 - RNA, 19 nt, synthetic construct
  source 1..19: mol_type = other RNA
  ncRNA 1..19: ncRNA_class = siRNA
tatgtcattgtcaaagcca

SEQ ID NO: 284 - RNA, 19 nt, synthetic construct
  source 1..19: mol_type = other RNA
  ncRNA 1..19: ncRNA_class = siRNA
tggctttgacaatgacata

SEQ ID NO: 285 - RNA, 19 nt, synthetic construct
  source 1..19: mol_type = other RNA
  ncRNA 1..19: ncRNA_class = siRNA
atactcccctggaaagccg

SEQ ID NO: 286 - RNA, 19 nt, synthetic construct
  source 1..19: mol_type = other RNA
  ncRNA 1..19: ncRNA_class = siRNA
cggctttccaggggagtat

SEQ ID NO: 287 - RNA, 19 nt, synthetic construct
  source 1..19: mol_type = other RNA
  ncRNA 1..19: ncRNA_class = siRNA
atcatgagtataaccttca

SEQ ID NO: 288 - RNA, 19 nt, synthetic construct
  source 1..19: mol_type = other RNA
  ncRNA 1..19: ncRNA_class = siRNA
tgaaggttatactcatgat

SEQ ID NO: 289 - RNA, 19 nt, synthetic construct
  source 1..19: mol_type = other RNA
  ncRNA 1..19: ncRNA_class = siRNA
tggcagacaaataggcgtg

SEQ ID NO: 290 - RNA, 19 nt, synthetic construct
  source 1..19: mol_type = other RNA
  ncRNA 1..19: ncRNA_class = siRNA
cacgcctatttgtctgcca

SEQ ID NO: 291 - RNA, 19 nt, synthetic construct
  source 1..19: mol_type = other RNA
  ncRNA 1..19: ncRNA_class = siRNA
tctttcaggatgtatttgg

SEQ ID NO: 292 - RNA, 19 nt, synthetic construct
  source 1..19: mol_type = other RNA
  ncRNA 1..19: ncRNA_class = siRNA
ccaaatacatcctgaaaga

SEQ ID NO: 293 - RNA, 19 nt, synthetic construct
  source 1..19: mol_type = other RNA
  ncRNA 1..19: ncRNA_class = siRNA
ttgaatcttgagaaagtcg

SEQ ID NO: 294 - RNA, 19 nt, synthetic construct
  source 1..19: mol_type = other RNA
  ncRNA 1..19: ncRNA_class = siRNA
cgactttctcaagattcaa

SEQ ID NO: 295 - RNA, 19 nt, synthetic construct
  source 1..19: mol_type = other RNA
  ncRNA 1..19: ncRNA_class = siRNA
cttgcccccactttctaag

SEQ ID NO: 296 - RNA, 19 nt, synthetic construct
  source 1..19: mol_type = other RNA
  ncRNA 1..19: ncRNA_class = siRNA
cttagaaagtgggggcaag

SEQ ID NO: 297 - RNA, 19 nt, synthetic construct
  source 1..19: mol_type = other RNA
  ncRNA 1..19: ncRNA_class = siRNA
agttccaatgtcatctgtc

SEQ ID NO: 298 - RNA, 19 nt, synthetic construct
  source 1..19: mol_type = other RNA
  ncRNA 1..19: ncRNA_class = siRNA
gacagatgacattggaact

SEQ ID NO: 299 - RNA, 19 nt, synthetic construct
  source 1..19: mol_type = other RNA
  ncRNA 1..19: ncRNA_class = siRNA
cttgagaaagtcgtaggga

SEQ ID NO: 300 - RNA, 19 nt, synthetic construct
  source 1..19: mol_type = other RNA
  ncRNA 1..19: ncRNA_class = siRNA
tccctacgactttctcaag

SEQ ID NO: 301 - RNA, 19 nt, synthetic construct
  source 1..19: mol_type = other RNA
  ncRNA 1..19: ncRNA_class = siRNA
tttcattgtgtagaaggtc

SEQ ID NO: 302 - RNA, 19 nt, synthetic construct
  source 1..19: mol_type = other RNA
  ncRNA 1..19: ncRNA_class = siRNA
gaccttctacacaatgaaa

SEQ ID NO: 303 - RNA, 19 nt, synthetic construct
  source 1..19: mol_type = other RNA
  ncRNA 1..19: ncRNA_class = siRNA
gccagtatgaaaagagact

SEQ ID NO: 304 - RNA, 19 nt, synthetic construct
  source 1..19: mol_type = other RNA
  ncRNA 1..19: ncRNA_class = siRNA
agtctcttttcatactggc

SEQ ID NO: 305 - RNA, 19 nt, synthetic construct
  source 1..19: mol_type = other RNA
  ncRNA 1..19: ncRNA_class = siRNA
agcttgacgaagtcgtact

SEQ ID NO: 306 - RNA, 19 nt, synthetic construct
  source 1..19: mol_type = other RNA
  ncRNA 1..19: ncRNA_class = siRNA
agtacgacttcgtcaagct

SEQ ID NO: 307 - RNA, 19 nt, synthetic construct
  source 1..19: mol_type = other RNA
  ncRNA 1..19: ncRNA_class = siRNA
caggtgcgcttgttacggt

SEQ ID NO: 308 - RNA, 19 nt, synthetic construct
  source 1..19: mol_type = other RNA
  ncRNA 1..19: ncRNA_class = siRNA
accgtaacaagcgcacctg

SEQ ID NO: 309 - RNA, 19 nt, synthetic construct
  source 1..19: mol_type = other RNA
  ncRNA 1..19: ncRNA_class = siRNA
gacgaagtcgtactcgcag

SEQ ID NO: 310 - RNA, 19 nt, synthetic construct
  source 1..19: mol_type = other RNA
  ncRNA 1..19: ncRNA_class = siRNA
ctgcgagtacgacttcgtc

SEQ ID NO: 311 - RNA, 19 nt, synthetic construct
  source 1..19: mol_type = other RNA
  ncRNA 1..19: ncRNA_class = siRNA
aggtaatgtccaggctgga

SEQ ID NO: 312 - RNA, 19 nt, synthetic construct
  source 1..19: mol_type = other RNA
  ncRNA 1..19: ncRNA_class = siRNA
tccagcctggacattacct

SEQ ID NO: 313 - RNA, 19 nt, synthetic construct
  source 1..19: mol_type = other RNA
  ncRNA 1..19: ncRNA_class = siRNA
tgacgaagtcgtactcgca

SEQ ID NO: 314 - RNA, 19 nt, synthetic construct
  source 1..19: mol_type = other RNA
  ncRNA 1..19: ncRNA_class = siRNA
tgcgagtacgacttcgtca

SEQ ID NO: 315 - RNA, 19 nt, synthetic construct
  source 1..19: mol_type = other RNA
  ncRNA 1..19: ncRNA_class = siRNA
ctgtgctcgtgtagtggat

SEQ ID NO: 316 - RNA, 19 nt, synthetic construct
  source 1..19: mol_type = other RNA
  ncRNA 1..19: ncRNA_class = siRNA
atccactacacgagcacag

SEQ ID NO: 317 - RNA, 19 nt, synthetic construct
  source 1..19: mol_type = other RNA
  ncRNA 1..19: ncRNA_class = siRNA
tcataaaggattcagcttc

SEQ ID NO: 318 - RNA, 19 nt, synthetic construct
  source 1..19: mol_type = other RNA
  ncRNA 1..19: ncRNA_class = siRNA
gaagctgaatcctttatga

SEQ ID NO: 319 - RNA, 19 nt, synthetic construct
  source 1..19: mol_type = other RNA
  ncRNA 1..19: ncRNA_class = siRNA
acatacattagatttctag

SEQ ID NO: 320 - RNA, 19 nt, synthetic construct
  source 1..19: mol_type = other RNA
  ncRNA 1..19: ncRNA_class = siRNA
ctagaaatctaatgtatgt

SEQ ID NO: 321 - RNA, 19 nt, synthetic construct
  source 1..19: mol_type = other RNA
  ncRNA 1..19: ncRNA_class = siRNA
catacattagatttctagc

SEQ ID NO: 322 - RNA, 19 nt, synthetic construct
  source 1..19: mol_type = other RNA
  ncRNA 1..19: ncRNA_class = siRNA
gctagaaatctaatgtatg

SEQ ID NO: 323 - RNA, 19 nt, synthetic construct
  source 1..19: mol_type = other RNA
  ncRNA 1..19: ncRNA_class = siRNA
agcatcatgagtataacct

SEQ ID NO: 324 - RNA, 19 nt, synthetic construct
  source 1..19: mol_type = other RNA
  ncRNA 1..19: ncRNA_class = siRNA
aggttatactcatgatgct

SEQ ID NO: 325 - RNA, 19 nt, synthetic construct
  source 1..19: mol_type = other RNA
  ncRNA 1..19: ncRNA_class = siRNA
cttcatgtataaaaacagc

SEQ ID NO: 326 - RNA, 19 nt, synthetic construct
  source 1..19: mol_type = other RNA
  ncRNA 1..19: ncRNA_class = siRNA
gctgtttttatacatgaag

SEQ ID NO: 327 - RNA, 19 nt, synthetic construct
  source 1..19: mol_type = other RNA
  ncRNA 1..19: ncRNA_class = siRNA
agacaaataggcgtgatgt

SEQ ID NO: 328 - RNA, 19 nt, synthetic construct
  source 1..19: mol_type = other RNA
  ncRNA 1..19: ncRNA_class = siRNA
acatcacgcctatttgtct

SEQ ID NO: 329 - RNA, 19 nt, synthetic construct
  source 1..19: mol_type = other RNA
  ncRNA 1..19: ncRNA_class = siRNA
acaaataggcgtgatgttg

SEQ ID NO: 330 - RNA, 19 nt, synthetic construct
  source 1..19: mol_type = other RNA
  ncRNA 1..19: ncRNA_class = siRNA
caacatcacgcctatttgt

SEQ ID NO: 331 - RNA, 19 nt, synthetic construct
  source 1..19: mol_type = other RNA
  ncRNA 1..19: ncRNA_class = siRNA
attgattacaactttgtta

SEQ ID NO: 332 - RNA, 19 nt, synthetic construct
  source 1..19: mol_type = other RNA
  ncRNA 1..19: ncRNA_class = siRNA
taacaaagttgtaatcaat

SEQ ID NO: 333 - RNA, 19 nt, synthetic construct
  source 1..19: mol_type = other RNA
  ncRNA 1..19: ncRNA_class = siRNA
tgtcatctgtcctcataaa

SEQ ID NO: 334 - RNA, 19 nt, synthetic construct
  source 1..19: mol_type = other RNA
  ncRNA 1..19: ncRNA_class = siRNA
tttatgaggacagatgaca

SEQ ID NO: 335 - RNA, 19 nt, synthetic construct
  source 1..19: mol_type = other RNA
  ncRNA 1..19: ncRNA_class = siRNA
atgagtataaccttcatgt

SEQ ID NO: 336 - RNA, 19 nt, synthetic construct
  source 1..19: mol_type = other RNA
  ncRNA 1..19: ncRNA_class = siRNA
acatgaaggttatactcat

SEQ ID NO: 337 - RNA, 19 nt, synthetic construct
  source 1..19: mol_type = other RNA
  ncRNA 1..19: ncRNA_class = siRNA
ctcgtcaatgtcctcggct

SEQ ID NO: 338 - RNA, 19 nt, synthetic construct
  source 1..19: mol_type = other RNA
  ncRNA 1..19: ncRNA_class = siRNA
agccgaggacattgacgag

SEQ ID NO: 339 - RNA, 19 nt, synthetic construct
  source 1..19: mol_type = other RNA
  ncRNA 1..19: ncRNA_class = siRNA
cttgacgaagtcgtactcg

SEQ ID NO: 340 - RNA, 19 nt, synthetic construct
  source 1..19: mol_type = other RNA
  ncRNA 1..19: ncRNA_class = siRNA
cgagtacgacttcgtcaag

SEQ ID NO: 341 - RNA, 19 nt, synthetic construct
  source 1..19: mol_type = other RNA
  ncRNA 1..19: ncRNA_class = siRNA
ttaatccccatccagatgc

SEQ ID NO: 342 - RNA, 19 nt, synthetic construct
  source 1..19: mol_type = other RNA
  ncRNA 1..19: ncRNA_class = siRNA
gcatctggatggggattaa

SEQ ID NO: 343 - RNA, 19 nt, synthetic construct
  source 1..19: mol_type = other RNA
  ncRNA 1..19: ncRNA_class = siRNA
gtactcgcagaggtgggag

SEQ ID NO: 344 - RNA, 19 nt, synthetic construct
  source 1..19: mol_type = other RNA
  ncRNA 1..19: ncRNA_class = siRNA
ctcccacctctgcgagtac

SEQ ID NO: 345 - RNA, 19 nt, synthetic construct
  source 1..19: mol_type = other RNA
  ncRNA 1..19: ncRNA_class = siRNA
atagaaggcctcgaacccc

SEQ ID NO: 346 - RNA, 19 nt, synthetic construct
  source 1..19: mol_type = other RNA
  ncRNA 1..19: ncRNA_class = siRNA
ggggttcgaggccttctat

SEQ ID NO: 347 - RNA, 19 nt, synthetic construct
  source 1..19: mol_type = other RNA
  ncRNA 1..19: ncRNA_class = siRNA
atttaatcagtgctatgtc

SEQ ID NO: 348 - RNA, 19 nt, synthetic construct
  source 1..19: mol_type = other RNA
  ncRNA 1..19: ncRNA_class = siRNA
gacatagcactgattaaat

SEQ ID NO: 349 - RNA, 19 nt, synthetic construct
  source 1..19: mol_type = other RNA
  ncRNA 1..19: ncRNA_class = siRNA
atgtcatctgtcctcataa

SEQ ID NO: 350 - RNA, 19 nt, synthetic construct
  source 1..19: mol_type = other RNA
  ncRNA 1..19: ncRNA_class = siRNA
ttatgaggacagatgacat

SEQ ID NO: 351 - RNA, 19 nt, synthetic construct
  source 1..19: mol_type = other RNA
  ncRNA 1..19: ncRNA_class = siRNA
agtatgaaaagagactggc

SEQ ID NO: 352 - RNA, 19 nt, synthetic construct
  source 1..19: mol_type = other RNA
  ncRNA 1..19: ncRNA_class = siRNA
gccagtctcttttcatact

SEQ ID NO: 353 - RNA, 19 nt, synthetic construct
  source 1..19: mol_type = other RNA
  ncRNA 1..19: ncRNA_class = siRNA
gttagcagttacacttccc

SEQ ID NO: 354 - RNA, 19 nt, synthetic construct
  source 1..19: mol_type = other RNA
  ncRNA 1..19: ncRNA_class = siRNA
gggaagtgtaactgctaac

SEQ ID NO: 355 - RNA, 19 nt, synthetic construct
  source 1..19: mol_type = other RNA
  ncRNA 1..19: ncRNA_class = siRNA
agccagtatgaaaagagac

SEQ ID NO: 356 - RNA, 19 nt, synthetic construct
  source 1..19: mol_type = other RNA
  ncRNA 1..19: ncRNA_class = siRNA
gtctcttttcatactggct

SEQ ID NO: 357 - RNA, 19 nt, synthetic construct
  source 1..19: mol_type = other RNA
  ncRNA 1..19: ncRNA_class = siRNA
gatgtatttggcttgcaca

SEQ ID NO: 358 - RNA, 19 nt, synthetic construct
  source 1..19: mol_type = other RNA
  ncRNA 1..19: ncRNA_class = siRNA
tgtgcaagccaaatacatc

SEQ ID NO: 359 - RNA, 19 nt, synthetic construct
  source 1..19: mol_type = other RNA
  ncRNA 1..19: ncRNA_class = siRNA
aatgccaacagccagtatg

SEQ ID NO: 360 - RNA, 19 nt, synthetic construct
  source 1..19: mol_type = other RNA
  ncRNA 1..19: ncRNA_class = siRNA
catactggctgttggcatt

SEQ ID NO: 361 - RNA, 19 nt, synthetic construct
  source 1..19: mol_type = other RNA
  ncRNA 1..19: ncRNA_class = siRNA
agcatgttagcagttacac

SEQ ID NO: 362 - RNA, 19 nt, synthetic construct
  source 1..19: mol_type = other RNA
  ncRNA 1..19: ncRNA_class = siRNA
gtgtaactgctaacatgct

SEQ ID NO: 363 - RNA, 19 nt, synthetic construct
  source 1..19: mol_type = other RNA
  ncRNA 1..19: ncRNA_class = siRNA
tgtcatataaaagtgcacc

SEQ ID NO: 364 - RNA, 19 nt, synthetic construct
  source 1..19: mol_type = other RNA
  ncRNA 1..19: ncRNA_class = siRNA
ggtgcacttttatatgaca

SEQ ID NO: 365 - RNA, 19 nt, synthetic construct
  source 1..19: mol_type = other RNA
  ncRNA 1..19: ncRNA_class = siRNA
gccaacagccagtatgaaa

SEQ ID NO: 366 - RNA, 19 nt, synthetic construct
  source 1..19: mol_type = other RNA
  ncRNA 1..19: ncRNA_class = siRNA
tttcatactggctgttggc

SEQ ID NO: 367 - RNA, 19 nt, synthetic construct
  source 1..19: mol_type = other RNA
  ncRNA 1..19: ncRNA_class = siRNA
acaaagtccagaatgacac

SEQ ID NO: 368 - RNA, 19 nt, synthetic construct
  source 1..19: mol_type = other RNA
  ncRNA 1..19: ncRNA_class = siRNA
gtgtcattctggactttgt

SEQ ID NO: 369 - RNA, 19 nt, synthetic construct
  source 1..19: mol_type = other RNA
  ncRNA 1..19: ncRNA_class = siRNA
aggttcaggccacttcggg

SEQ ID NO: 370 - RNA, 19 nt, synthetic construct
  source 1..19: mol_type = other RNA
  ncRNA 1..19: ncRNA_class = siRNA
cccgaagtggcctgaacct

SEQ ID NO: 371 - RNA, 19 nt, synthetic construct
  source 1..19: mol_type = other RNA
  ncRNA 1..19: ncRNA_class = siRNA
ctaatatcaggacttgcca

SEQ ID NO: 372 - RNA, 19 nt, synthetic construct
  source 1..19: mol_type = other RNA
  ncRNA 1..19: ncRNA_class = siRNA
tggcaagtcctgatattag

SEQ ID NO: 373 - RNA, 19 nt, synthetic construct
  source 1..19: mol_type = other RNA
  ncRNA 1..19: ncRNA_class = siRNA
tctgtgacaaaggtgatgg

SEQ ID NO: 374 - RNA, 19 nt, synthetic construct
  source 1..19: mol_type = other RNA
  ncRNA 1..19: ncRNA_class = siRNA
ccatcacctttgtcacaga

SEQ ID NO: 375 - RNA, 19 nt, synthetic construct
  source 1..19: mol_type = other RNA
  ncRNA 1..19: ncRNA_class = siRNA
tttcatatgcagcagtaca

SEQ ID NO: 376 - RNA, 19 nt, synthetic construct
  source 1..19: mol_type = other RNA
  ncRNA 1..19: ncRNA_class = siRNA
tgtactgctgcatatgaaa

SEQ ID NO: 377 - RNA, 19 nt, synthetic construct
  source 1..19: mol_type = other RNA
  ncRNA 1..19: ncRNA_class = siRNA
aagacctggccggagcaca

SEQ ID NO: 378 - RNA, 19 nt, synthetic construct
  source 1..19: mol_type = other RNA
  ncRNA 1..19: ncRNA_class = siRNA
tgtgctccggccaggtctt

SEQ ID NO: 379 - RNA, 19 nt, synthetic construct
  source 1..19: mol_type = other RNA
  ncRNA 1..19: ncRNA_class = siRNA
tcatggtgtgcccgtccag

SEQ ID NO: 380 - RNA, 19 nt, synthetic construct
  source 1..19: mol_type = other RNA
  ncRNA 1..19: ncRNA_class = siRNA
ctggacgggcacaccatga

SEQ ID NO: 381 - RNA, 19 nt, synthetic construct
  source 1..19: mol_type = other RNA
  ncRNA 1..19: ncRNA_class = siRNA
gaaggtaatgtccaggctg

SEQ ID NO: 382 - RNA, 19 nt, synthetic construct
  source 1..19: mol_type = other RNA
  ncRNA 1..19: ncRNA_class = siRNA
cagcctggacattaccttc

SEQ ID NO: 383 - RNA, 19 nt, synthetic construct
  source 1..19: mol_type = other RNA
  ncRNA 1..19: ncRNA_class = siRNA
aagtcgtactcgcagaggt

SEQ ID NO: 384 - RNA, 19 nt, synthetic construct
  source 1..19: mol_type = other RNA
  ncRNA 1..19: ncRNA_class = siRNA
acctctgcgagtacgactt

SEQ ID NO: 385 - RNA, 19 nt, synthetic construct
  source 1..19: mol_type = other RNA
  ncRNA 1..19: ncRNA_class = siRNA
ttgggtgaagtagaggcgc

SEQ ID NO: 386 - RNA, 19 nt, synthetic construct
  source 1..19: mol_type = other RNA
  ncRNA 1..19: ncRNA_class = siRNA
tacgaagtcgtactcgcag

SEQ ID NO: 387 - RNA, 19 nt, synthetic construct
  source 1..19: mol_type = other RNA
  ncRNA 1..19: ncRNA_class = siRNA
ttagaaggcctcgaacccc

SEQ ID NO: 388 - RNA, 19 nt, synthetic construct
  source 1..19: mol_type = other RNA
  ncRNA 1..19: ncRNA_class = siRNA
taaggtaatgtccaggctg

SEQ ID NO: 389 - RNA, 19 nt, synthetic construct
  source 1..19: mol_type = other RNA
  ncRNA 1..19: ncRNA_class = siRNA
tagtcgtactcgcagaggt

SEQ ID NO: 390 - RNA, 19 nt, synthetic construct
  source 1..19: mol_type = other RNA
  modified_base order(1,3,5,7,9,11,13,15,17,19): mod_base = OTHER; note = 2-prime-O-Methyl RNA nucleotides
  ncRNA 1..19: ncRNA_class = siRNA
  modified_base order(2,4,6,8,10,12,14,16,18): mod_base = OTHER; note = 2-prime deoxy-2-prime-F RNA nucleotides
  modified_base 1^2: mod_base = OTHER; note = Phosphorothioate
  modified_base 2^3: mod_base = OTHER; note = Phosphorothioate
  modified_base 17^18: mod_base = OTHER; note = Phosphorothioate
  modified_base 18^19: mod_base = OTHER; note = Phosphorothioate
gacttgccaaggaaaatca

SEQ ID NO: 391 - RNA, 19 nt, synthetic construct
  source 1..19: mol_type = other RNA
  ncRNA 1..19: ncRNA_class = siRNA
  modified_base order(1..6,10..19): mod_base = OTHER; note = 2-prime-O-Methyl RNA nucleotides
  modified_base 7..9: mod_base = OTHER; note = 2-prime deoxy-2-prime-F RNA nucleotides
  modified_base 1^2: mod_base = OTHER; note = Phosphorothioate
  modified_base 2^3: mod_base = OTHER; note = Phosphorothioate
  modified_base 17^18: mod_base = OTHER; note = Phosphorothioate
  modified_base 18^19: mod_base = OTHER; note = Phosphorothioate
tgattttccttggcaagtc

SEQ ID NO: 392 - RNA, 19 nt, synthetic construct
  source 1..19: mol_type = other RNA
  ncRNA 1..19: ncRNA_class = siRNA
  modified_base order(1,3,5,7,9,11,13,15,17,19): mod_base = OTHER; note = 2-prime-O-Methyl RNA nucleotides
  modified_base order(2,4,6,8,10,12,14,16,18): mod_base = OTHER; note = 2-prime deoxy-2-prime-F RNA nucleotides
  modified_base 1^2: mod_base = OTHER; note = Phosphorothioate
  modified_base 2^3: mod_base = OTHER; note = Phosphorothioate
  modified_base 17^18: mod_base = OTHER; note = Phosphorothioate
  modified_base 18^19: mod_base = OTHER; note = Phosphorothioate
tgggtagatcatcaggagg

SEQ ID NO: 393 - RNA, 19 nt, synthetic construct
  source 1..19: mol_type = other RNA
  ncRNA 1..19: ncRNA_class = siRNA
  modified_base order(1..6,10..19): mod_base = OTHER; note = 2-prime-O-Methyl RNA nucleotides
  modified_base 7..9: mod_base = OTHER; note = 2-prime deoxy-2-prime-F RNA nucleotides
  modified_base 1^2: mod_base = OTHER; note = Phosphorothioate
  modified_base 2^3: mod_base = OTHER; note = Phosphorothioate
  modified_base 17^18: mod_base = OTHER; note = Phosphorothioate
  modified_base 18^19: mod_base = OTHER; note = Phosphorothioate
cctcctgatgatctaccca

SEQ ID NO: 394 - RNA, 19 nt, synthetic construct
  source 1..19: mol_type = other RNA
  ncRNA 1..19: ncRNA_class = siRNA
  modified_base order(1,3,5,7,9,11,13,15,17,19): mod_base = OTHER; note = 2-prime-O-Methyl RNA nucleotides
  modified_base order(2,4,6,8,10,12,14,16,18): mod_base = OTHER; note = 2-prime deoxy-2-prime-F RNA nucleotides
  modified_base 1^2: mod_base = OTHER; note = Phosphorothioate
  modified_base 2^3: mod_base = OTHER; note = Phosphorothioate
  modified_base 17^18: mod_base = OTHER; note = Phosphorothioate
  modified_base 18^19: mod_base = OTHER; note = Phosphorothioate
tccacatcgaaggactcca

SEQ ID NO: 395 - RNA, 19 nt, synthetic construct
  source 1..19: mol_type = other RNA
  ncRNA 1..19: ncRNA_class = siRNA
  modified_base order(1..6,10..19): mod_base = OTHER; note = 2-prime-O-Methyl RNA nucleotides
  modified_base 7..9: mod_base = OTHER; note = 2-prime deoxy-2-prime-F RNA nucleotides
  modified_base 1^2: mod_base = OTHER; note = Phosphorothioate
  modified_base 2^3: mod_base = OTHER; note = Phosphorothioate
  modified_base 17^18: mod_base = OTHER; note = Phosphorothioate
  modified_base 18^19: mod_base = OTHER; note = Phosphorothioate
tggagtccttcgatgtgga

SEQ ID NO: 396 - RNA, 19 nt, synthetic construct
  source 1..19: mol_type = other RNA
  ncRNA 1..19: ncRNA_class = siRNA
  modified_base order(1,3,5,7,9,11,13,15,17,19): mod_base = OTHER; note = 2-prime-O-Methyl RNA nucleotides
  modified_base order(2,4,6,8,10,12,14,16,18): mod_base = OTHER; note = 2-prime deoxy-2-prime-F RNA nucleotides
  modified_base 1^2: mod_base = OTHER; note = Phosphorothioate
  modified_base 2^3: mod_base = OTHER; note = Phosphorothioate
  modified_base 17^18: mod_base = OTHER; note = Phosphorothioate
  modified_base 18^19: mod_base = OTHER; note = Phosphorothioate
ttggcttgcacaggtgaaa

SEQ ID NO: 397 - RNA, 19 nt, synthetic construct
  source 1..19: mol_type = other RNA
  modified_base order(1..6,10..19): mod_base = OTHER; note = 2-prime-O-Methyl RNA nucleotides
  ncRNA 1..19: ncRNA_class = siRNA
  modified_base 7..9: mod_base = OTHER; note = 2-prime deoxy-2-prime-F RNA nucleotides
  modified_base 1^2: mod_base = OTHER; note = Phosphorothioate
  modified_base 2^3: mod_base = OTHER; note = Phosphorothioate
  modified_base 17^18: mod_base = OTHER; note = Phosphorothioate
  modified_base 18^19: mod_base = OTHER; note = Phosphorothioate
tttcacctgtgcaagccaa

SEQ ID NO: 398 - RNA, 19 nt, synthetic construct
  source 1..19: mol_type = other RNA
  ncRNA 1..19: ncRNA_class = siRNA
  modified_base order(1,3,5,7,9,11,13,15,17,19): mod_base = OTHER; note = 2-prime-O-Methyl RNA nucleotides
  modified_base order(2,4,6,8,10,12,14,16,18): mod_base = OTHER; note = 2-prime deoxy-2-prime-F RNA nucleotides
  modified_base 1^2: mod_base = OTHER; note = Phosphorothioate
  modified_base 2^3: mod_base = OTHER; note = Phosphorothioate
  modified_base 17^18: mod_base = OTHER; note = Phosphorothioate
  modified_base 18^19: mod_base = OTHER; note = Phosphorothioate
attgtgtagaaggtctctt

SEQ ID NO: 399 - RNA, 19 nt, synthetic construct
  source 1..19: mol_type = other RNA
  ncRNA 1..19: ncRNA_class = siRNA
  modified_base order(1..6,10..19): mod_base = OTHER; note = 2-prime-O-Methyl RNA nucleotides
  modified_base 7..9: mod_base = OTHER; note = 2-prime deoxy-2-prime-F RNA nucleotides
  modified_base 1^2: mod_base = OTHER; note = Phosphorothioate
  modified_base 2^3: mod_base = OTHER; note = Phosphorothioate
  modified_base 17^18: mod_base = OTHER; note = Phosphorothioate
  modified_base 18^19: mod_base = OTHER; note = Phosphorothioate
aagagaccttctacacaat

SEQ ID NO: 400 - RNA, 19 nt, synthetic construct
  source 1..19: mol_type = other RNA
  ncRNA 1..19: ncRNA_class = siRNA
  modified_base order(1,3,5,7,9,11,13,15,17,19): mod_base = OTHER; note = 2-prime-O-Methyl RNA nucleotides
  modified_base order(2,4,6,8,10,12,14,16,18): mod_base = OTHER; note = 2-prime deoxy-2-prime-F RNA nucleotides
  modified_base 1^2: mod_base = OTHER; note = Phosphorothioate
  modified_base 2^3: mod_base = OTHER; note = Phosphorothioate
  modified_base 17^18: mod_base = OTHER; note = Phosphorothioate
  modified_base 18^19: mod_base = OTHER; note = Phosphorothioate
acagctttgtaggtggtca

SEQ ID NO: 401 - RNA, 19 nt, synthetic construct
  source 1..19: mol_type = other RNA
  ncRNA 1..19: ncRNA_class = siRNA
  modified_base order(1..6,10..19): mod_base = OTHER; note = 2-prime-O-Methyl RNA nucleotides
  modified_base 7..9: mod_base = OTHER; note = 2-prime deoxy-2-prime-F RNA nucleotides
  modified_base 1^2: mod_base = OTHER; note = Phosphorothioate
  modified_base 2^3: mod_base = OTHER; note = Phosphorothioate
  modified_base 17^18: mod_base = OTHER; note = Phosphorothioate
  modified_base 18^19: mod_base = OTHER; note = Phosphorothioate
tgaccacctacaaagctgt

SEQ ID NO: 402 - RNA, 19 nt, synthetic construct
  source 1..19: mol_type = other RNA
  ncRNA 1..19: ncRNA_class = siRNA
  modified_base order(1,3,5,7,9,11,13,15,17,19): mod_base = OTHER; note = 2-prime-O-Methyl RNA nucleotides
  modified_base order(2,4,6,8,10,12,14,16,18): mod_base = OTHER; note = 2-prime deoxy-2-prime-F RNA nucleotides
  modified_base 1^2: mod_base = OTHER; note = Phosphorothioate
  modified_base 2^3: mod_base = OTHER; note = Phosphorothioate
  modified_base 17^18: mod_base = OTHER; note = Phosphorothioate
  modified_base 18^19: mod_base = OTHER; note = Phosphorothioate
agtagaggcgcaggcggta

SEQ ID NO: 403 - RNA, 19 nt, synthetic construct
  source 1..19: mol_type = other RNA
  ncRNA 1..19: ncRNA_class = siRNA
  modified_base order(1..6,10..19): mod_base = OTHER; note = 2-prime-O-Methyl RNA nucleotides
  modified_base 7..9: mod_base = OTHER; note = 2-prime deoxy-2-prime-F RNA nucleotides
  modified_base 1^2: mod_base = OTHER; note = Phosphorothioate
  modified_base 2^3: mod_base = OTHER; note = Phosphorothioate
  modified_base 17^18: mod_base = OTHER; note = Phosphorothioate
  modified_base 18^19: mod_base = OTHER; note = Phosphorothioate
taccgcctgcgcctctact

SEQ ID NO: 404 - RNA, 19 nt, synthetic construct
  source 1..19: mol_type = other RNA
  modified_base order(1,3,5,7,9,11,13,15,17,19): mod_base = OTHER; note = 2-prime-O-Methyl RNA nucleotides
  modified_base order(2,4,6,8,10,12,14,16,18): mod_base = OTHER; note = 2-prime deoxy-2-prime-F RNA nucleotides
  ncRNA 1..19: ncRNA_class = siRNA
  modified_base 1^2: mod_base = OTHER; note = Phosphorothioate
  modified_base 2^3: mod_base = OTHER; note = Phosphorothioate
  modified_base 17^18: mod_base = OTHER; note = Phosphorothioate
  modified_base 18^19: mod_base = OTHER; note = Phosphorothioate
tctcctttggagctcgtcc

SEQ ID NO: 405 - RNA, 19 nt, synthetic construct
  source 1..19: mol_type = other RNA
  ncRNA 1..19: ncRNA_class = siRNA
  modified_base order(1..6,10..19): mod_base = OTHER; note = 2-prime-O-Methyl RNA nucleotides
  modified_base 7..9: mod_base = OTHER; note = 2-prime deoxy-2-prime-F RNA nucleotides
  modified_base 1^2: mod_base = OTHER; note = Phosphorothioate
  modified_base 2^3: mod_base = OTHER; note = Phosphorothioate
  modified_base 17^18: mod_base = OTHER; note = Phosphorothioate
  modified_base 18^19: mod_base = OTHER; note = Phosphorothioate
ggacgagctccaaaggaga

SEQ ID NO: 406 - RNA, 19 nt, synthetic construct
  source 1..19: mol_type = other RNA
  ncRNA 1..19: ncRNA_class = siRNA
  modified_base order(1,3,5,7,9,11,13,15,17,19): mod_base = OTHER; note = 2-prime-O-Methyl RNA nucleotides
  modified_base order(2,4,6,8,10,12,14,16,18): mod_base = OTHER; note = 2-prime deoxy-2-prime-F RNA nucleotides
  modified_base 1^2: mod_base = OTHER; note = Phosphorothioate
  modified_base 2^3: mod_base = OTHER; note = Phosphorothioate
  modified_base 17^18: mod_base = OTHER; note = Phosphorothioate
  modified_base 18^19: mod_base = OTHER; note = Phosphorothioate
agaatccatcagcctcaca

SEQ ID NO: 407 - RNA, 19 nt, synthetic construct
  source 1..19: mol_type = other RNA
  ncRNA 1..19: ncRNA_class = siRNA
  modified_base order(1..6,10..19): mod_base = OTHER; note = 2-prime-O-Methyl RNA nucleotides
  modified_base 7..9: mod_base = OTHER; note = 2-prime deoxy-2-prime-F RNA nucleotides
  modified_base 1^2: mod_base = OTHER; note = Phosphorothioate
  modified_base 2^3: mod_base = OTHER; note = Phosphorothioate
  modified_base 17^18: mod_base = OTHER; note = Phosphorothioate
  modified_base 18^19: mod_base = OTHER; note = Phosphorothioate
tgtgaggctgatggattct

SEQ ID NO: 408 - RNA, 19 nt, synthetic construct
  source 1..19: mol_type = other RNA
  ncRNA 1..19: ncRNA_class = siRNA
  modified_base order(1,3,5,7,9,11,13,15,17,19): mod_base = OTHER; note = 2-prime-O-Methyl RNA nucleotides
  modified_base order(2,4,6,8,10,12,14,16,18): mod_base = OTHER; note = 2-prime deoxy-2-prime-F RNA nucleotides
  modified_base 1^2: mod_base = OTHER; note = Phosphorothioate
  modified_base 2^3: mod_base = OTHER; note = Phosphorothioate
  modified_base 17^18: mod_base = OTHER; note = Phosphorothioate
  modified_base 18^19: mod_base = OTHER; note = Phosphorothioate
ggtcccaagatccatcttt

SEQ ID NO: 409 - RNA, 19 nt, synthetic construct
  source 1..19: mol_type = other RNA
  ncRNA 1..19: ncRNA_class = siRNA
  modified_base order(1..6,10..19): mod_base = OTHER; note = 2-prime-O-Methyl RNA nucleotides
  modified_base 7..9: mod_base = OTHER; note = 2-prime deoxy-2-prime-F RNA nucleotides
  modified_base 1^2: mod_base = OTHER; note = Phosphorothioate
  modified_base 2^3: mod_base = OTHER; note = Phosphorothioate
  modified_base 17^18: mod_base = OTHER; note = Phosphorothioate
  modified_base 18^19: mod_base = OTHER; note = Phosphorothioate
aaagatggatcttgggacc

SEQ ID NO: 410 - RNA, 19 nt, synthetic construct
  source 1..19: mol_type = other RNA
  modified_base order(1,3,5,7,9,11,13,15,17,19): mod_base = OTHER; note = 2-prime-O-Methyl RNA nucleotides
  modified_base order(2,4,6,8,10,12,14,16,18): mod_base = OTHER; note = 2-prime deoxy-2-prime-F RNA nucleotides
  ncRNA 1..19: ncRNA_class = siRNA
  modified_base 1^2: mod_base = OTHER; note = Phosphorothioate
  modified_base 2^3: mod_base = OTHER; note = Phosphorothioate
  modified_base 17^18: mod_base = OTHER; note = Phosphorothioate
  modified_base 18^19: mod_base = OTHER; note = Phosphorothioate
gcattggccggtcccaaga

SEQ ID NO: 411 - RNA, 19 nt, synthetic construct
  source 1..19: mol_type = other RNA
  ncRNA 1..19: ncRNA_class = siRNA
  modified_base order(1..6,10..19): mod_base = OTHER; note = 2-prime-O-Methyl RNA nucleotides
  modified_base 7..9: mod_base = OTHER; note = 2-prime deoxy-2-prime-F RNA nucleotides
  modified_base 1^2: mod_base = OTHER; note = Phosphorothioate
  modified_base 2^3: mod_base = OTHER; note = Phosphorothioate
  modified_base 17^18: mod_base = OTHER; note = Phosphorothioate
  modified_base 18^19: mod_base = OTHER; note = Phosphorothioate
tcttgggaccggccaatgc

SEQ ID NO: 412 - RNA, 19 nt, synthetic construct
  source 1..19: mol_type = other RNA
  ncRNA 1..19: ncRNA_class = siRNA
  modified_base order(1,3,5,7,9,11,13,15,17,19): mod_base = OTHER; note = 2-prime-O-Methyl RNA nucleotides
  modified_base order(2,4,6,8,10,12,14,16,18): mod_base = OTHER; note = 2-prime deoxy-2-prime-F RNA nucleotides
  modified_base 1^2: mod_base = OTHER; note = Phosphorothioate
  modified_base 2^3: mod_base = OTHER; note = Phosphorothioate
  modified_base 17^18: mod_base = OTHER; note = Phosphorothioate
  modified_base 18^19: mod_base = OTHER; note = Phosphorothioate
ccacaaacaggctcacaga

SEQ ID NO: 413 - RNA, 19 nt, synthetic construct
  source 1..19: mol_type = other RNA
  ncRNA 1..19: ncRNA_class = siRNA
  modified_base order(1..6,10..19): mod_base = OTHER; note = 2-prime-O-Methyl RNA nucleotides
  modified_base 7..9: mod_base = OTHER; note = 2-prime deoxy-2-prime-F RNA nucleotides
  modified_base 1^2: mod_base = OTHER; note = Phosphorothioate
  modified_base 2^3: mod_base = OTHER; note = Phosphorothioate
  modified_base 17^18: mod_base = OTHER; note = Phosphorothioate
  modified_base 18^19: mod_base = OTHER; note = Phosphorothioate
tctgtgagcctgtttgtgg

SEQ ID NO: 414 - RNA, 19 nt, synthetic construct
  source 1..19: mol_type = other RNA
  ncRNA 1..19: ncRNA_class = siRNA
  modified_base order(1,3,5,7,9,11,13,15,17,19): mod_base = OTHER; note = 2-prime-O-Methyl RNA nucleotides
  modified_base order(2,4,6,8,10,12,14,16,18): mod_base = OTHER; note = 2-prime deoxy-2-prime-F RNA nucleotides
  modified_base 1^2: mod_base = OTHER; note = Phosphorothioate
  modified_base 2^3: mod_base = OTHER; note = Phosphorothioate
  modified_base 17^18: mod_base = OTHER; note = Phosphorothioate
  modified_base 18^19: mod_base = OTHER; note = Phosphorothioate
gtactgaatcacagctttg

SEQ ID NO: 415 - RNA, 19 nt, synthetic construct
  source 1..19: mol_type = other RNA
  ncRNA 1..19: ncRNA_class = siRNA
  modified_base order(1..6,10..19): mod_base = OTHER; note = 2-prime-O-Methyl RNA nucleotides
  modified_base 7..9: mod_base = OTHER; note = 2-prime deoxy-2-prime-F RNA nucleotides
  modified_base 1^2: mod_base = OTHER; note = Phosphorothioate
  modified_base 2^3: mod_base = OTHER; note = Phosphorothioate
  modified_base 17^18: mod_base = OTHER; note = Phosphorothioate
  modified_base 18^19: mod_base = OTHER; note = Phosphorothioate
caaagctgtgattcagtac

SEQ ID NO: 416 - RNA, 19 nt, synthetic construct
  source 1..19: mol_type = other RNA
  ncRNA 1..19: ncRNA_class = siRNA
  modified_base order(1,3,5,7,9,11,13,15,17,19): mod_base = OTHER; note = 2-prime-O-Methyl RNA nucleotides
  modified_base order(2,4,6,8,10,12,14,16,18): mod_base = OTHER; note = 2-prime deoxy-2-prime-F RNA nucleotides
  modified_base 1^2: mod_base = OTHER; note = Phosphorothioate
  modified_base 2^3: mod_base = OTHER; note = Phosphorothioate
  modified_base 17^18: mod_base = OTHER; note = Phosphorothioate
  modified_base 18^19: mod_base = OTHER; note = Phosphorothioate
ctaagccagcacaaagcat

SEQ ID NO: 417 - RNA, 19 nt, synthetic construct
  source 1..19: mol_type = other RNA
  ncRNA 1..19: ncRNA_class = siRNA
  modified_base order(1..6,10..19): mod_base = OTHER; note = 2-prime-O-Methyl RNA nucleotides
  modified_base 7..9: mod_base = OTHER; note = 2-prime deoxy-2-prime-F RNA nucleotides
  modified_base 1^2: mod_base = OTHER; note = Phosphorothioate
  modified_base 2^3: mod_base = OTHER; note = Phosphorothioate
  modified_base 17^18: mod_base = OTHER; note = Phosphorothioate
  modified_base 18^19: mod_base = OTHER; note = Phosphorothioate
atgctttgtgctggcttag

SEQ ID NO: 418 - RNA, 19 nt, synthetic construct
  source 1..19: mol_type = other RNA
  ncRNA 1..19: ncRNA_class = siRNA
  modified_base order(1,3,5,7,9,11,13,15,17,19): mod_base = OTHER; note = 2-prime-O-Methyl RNA nucleotides
  modified_base order(2,4,6,8,10,12,14,16,18): mod_base = OTHER; note = 2-prime deoxy-2-prime-F RNA nucleotides
  modified_base 1^2: mod_base = OTHER; note = Phosphorothioate
  modified_base 2^3: mod_base = OTHER; note = Phosphorothioate
  modified_base 17^18: mod_base = OTHER; note = Phosphorothioate
  modified_base 18^19: mod_base = OTHER; note = Phosphorothioate
ttcacagctgtactgaatc

SEQ ID NO: 419 - RNA, 19 nt, synthetic construct
  source 1..19: mol_type = other RNA
  ncRNA 1..19: ncRNA_class = siRNA
  modified_base order(1..6,10..19): mod_base = OTHER; note = 2-prime-O-Methyl RNA nucleotides
  modified_base 7..9: mod_base = OTHER; note = 2-prime deoxy-2-prime-F RNA nucleotides
  modified_base 1^2: mod_base = OTHER; note = Phosphorothioate
  modified_base 2^3: mod_base = OTHER; note = Phosphorothioate
  modified_base 17^18: mod_base = OTHER; note = Phosphorothioate
  modified_base 18^19: mod_base = OTHER; note = Phosphorothioate
gattcagtacagctgtgaa

SEQ ID NO: 420 - RNA, 19 nt, synthetic construct
  source 1..19: mol_type = other RNA
  ncRNA 1..19: ncRNA_class = siRNA
  modified_base order(1,3,5,7,9,11,13,15,17,19): mod_base = OTHER; note = 2-prime-O-Methyl RNA nucleotides
  modified_base order(2,4,6,8,10,12,14,16,18): mod_base = OTHER; note = 2-prime deoxy-2-prime-F RNA nucleotides
  modified_base 1^2: mod_base = OTHER; note = Phosphorothioate
  modified_base 2^3: mod_base = OTHER; note = Phosphorothioate
  modified_base 17^18: mod_base = OTHER; note = Phosphorothioate
  modified_base 18^19: mod_base = OTHER; note = Phosphorothioate
taagccagcacaaagcatg

SEQ ID NO: 421 - RNA, 19 nt, synthetic construct
  source 1..19: mol_type = other RNA
  ncRNA 1..19: ncRNA_class = siRNA
  modified_base order(1..6,10..19): mod_base = OTHER; note = 2-prime-O-Methyl RNA nucleotides
  modified_base 7..9: mod_base = OTHER; note = 2-prime deoxy-2-prime-F RNA nucleotides
  modified_base 1^2: mod_base = OTHER; note = Phosphorothioate
  modified_base 2^3: mod_base = OTHER; note = Phosphorothioate
  modified_base 17^18: mod_base = OTHER; note = Phosphorothioate
  modified_base 18^19: mod_base = OTHER; note = Phosphorothioate
catgctttgtgctggctta

SEQ ID NO: 422 - RNA, 19 nt, synthetic construct
  source 1..19: mol_type = other RNA
  ncRNA 1..19: ncRNA_class = siRNA
  modified_base order(1,3,5,7,9,11,13,15,17,19): mod_base = OTHER; note = 2-prime-O-Methyl RNA nucleotides
  modified_base order(2,4,6,8,10,12,14,16,18): mod_base = OTHER; note = 2-prime deoxy-2-prime-F RNA nucleotides
  modified_base 1^2: mod_base = OTHER; note = Phosphorothioate
  modified_base 2^3: mod_base = OTHER; note = Phosphorothioate
  modified_base 17^18: mod_base = OTHER; note = Phosphorothioate
  modified_base 18^19: mod_base = OTHER; note = Phosphorothioate
agtagtcggagcggaaggt

SEQ ID NO: 423 - RNA, 19 nt, synthetic construct
  source 1..19: mol_type = other RNA
  ncRNA 1..19: ncRNA_class = siRNA
  modified_base order(1..6,10..19): mod_base = OTHER; note = 2-prime-O-Methyl RNA nucleotides
  modified_base 7..9: mod_base = OTHER; note = 2-prime deoxy-2-prime-F RNA nucleotides
  modified_base 1^2: mod_base = OTHER; note = Phosphorothioate
  modified_base 2^3: mod_base = OTHER; note = Phosphorothioate
  modified_base 17^18: mod_base = OTHER; note = Phosphorothioate
  modified_base 18^19: mod_base = OTHER; note = Phosphorothioate
accttccgctccgactact

SEQ ID NO: 424 - RNA, 19 nt, synthetic construct
  source 1..19: mol_type = other RNA
  ncRNA 1..19: ncRNA_class = siRNA
  modified_base order(1,3,5,7,9,11,13,15,17,19): mod_base = OTHER; note = 2-prime-O-Methyl RNA nucleotides
  modified_base order(2,4,6,8,10,12,14,16,18): mod_base = OTHER; note = 2-prime deoxy-2-prime-F RNA nucleotides
  modified_base 1^2: mod_base = OTHER; note = Phosphorothioate
  modified_base 2^3: mod_base = OTHER; note = Phosphorothioate
  modified_base 17^18: mod_base = OTHER; note = Phosphorothioate
  modified_base 18^19: mod_base = OTHER; note = Phosphorothioate
tctcgatccagggaatata

SEQ ID NO: 425 - RNA, 19 nt, synthetic construct
  source 1..19: mol_type = other RNA
  ncRNA 1..19: ncRNA_class = siRNA
  modified_base order(1..6,10..19): mod_base = OTHER; note = 2-prime-O-Methyl RNA nucleotides
  modified_base 7..9: mod_base = OTHER; note = 2-prime deoxy-2-prime-F RNA nucleotides
  modified_base 1^2: mod_base = OTHER; note = Phosphorothioate
  modified_base 2^3: mod_base = OTHER; note = Phosphorothioate
  modified_base 17^18: mod_base = OTHER; note = Phosphorothioate
  modified_base 18^19: mod_base = OTHER; note = Phosphorothioate
tatattccctggatcgaga

SEQ ID NO: 426 - RNA, 19 nt, synthetic construct
  source 1..19: mol_type = other RNA
  ncRNA 1..19: ncRNA_class = siRNA
  modified_base order(1,3,5,7,9,11,13,15,17,19): mod_base = OTHER; note = 2-prime-O-Methyl RNA nucleotides
  modified_base order(2,4,6,8,10,12,14,16,18): mod_base = OTHER; note = 2-prime deoxy-2-prime-F RNA nucleotides
  modified_base 1^2: mod_base = OTHER; note = Phosphorothioate
  modified_base 2^3: mod_base = OTHER; note = Phosphorothioate
  modified_base 17^18: mod_base = OTHER; note = Phosphorothioate
  modified_base 18^19: mod_base = OTHER; note = Phosphorothioate
tcgaagtgggtgaagtaga

SEQ ID NO: 427 - RNA, 19 nt, synthetic construct
  source 1..19: mol_type = other RNA
  ncRNA 1..19: ncRNA_class = siRNA
  modified_base order(1..6,10..19): mod_base = OTHER; note = 2-prime-O-Methyl RNA nucleotides
  modified_base 7..9: mod_base = OTHER; note = 2-prime deoxy-2-prime-F RNA nucleotides
  modified_base 1^2: mod_base = OTHER; note = Phosphorothioate
  modified_base 2^3: mod_base = OTHER; note = Phosphorothioate
  modified_base 17^18: mod_base = OTHER; note = Phosphorothioate
  modified_base 18^19: mod_base = OTHER; note = Phosphorothioate
tctacttcacccacttcga

SEQ ID NO: 428 - RNA, 19 nt, synthetic construct
  source 1..19: mol_type = other RNA
  ncRNA 1..19: ncRNA_class = siRNA
  modified_base order(1,3,5,7,9,11,13,15,17,19): mod_base = OTHER; note = 2-prime-O-Methyl RNA nucleotides
  modified_base order(2,4,6,8,10,12,14,16,18): mod_base = OTHER; note = 2-prime deoxy-2-prime-F RNA nucleotides
  modified_base 1^2: mod_base = OTHER; note = Phosphorothioate
  modified_base 2^3: mod_base = OTHER; note = Phosphorothioate
  modified_base 17^18: mod_base = OTHER; note = Phosphorothioate
  modified_base 18^19: mod_base = OTHER; note = Phosphorothioate
cttgccaaggaaaatcacc

SEQ ID NO: 429 - RNA, 19 nt, synthetic construct
  source 1..19: mol_type = other RNA
  ncRNA 1..19: ncRNA_class = siRNA
  modified_base order(1..6,10..19): mod_base = OTHER; note = 2-prime-O-Methyl RNA nucleotides
  modified_base 7..9: mod_base = OTHER; note = 2-prime deoxy-2-prime-F RNA nucleotides
  modified_base 1^2: mod_base = OTHER; note = Phosphorothioate
  modified_base 2^3: mod_base = OTHER; note = Phosphorothioate
  modified_base 17^18: mod_base = OTHER; note = Phosphorothioate
  modified_base 18^19: mod_base = OTHER; note = Phosphorothioate
ggtgattttccttggcaag

SEQ ID NO: 430 - RNA, 19 nt, synthetic construct
  source 1..19: mol_type = other RNA
  ncRNA 1..19: ncRNA_class = siRNA
  modified_base order(1,3,5,7,9,11,13,15,17,19): mod_base = OTHER; note = 2-prime-O-Methyl RNA nucleotides
  modified_base order(2,4,6,8,10,12,14,16,18): mod_base = OTHER; note = 2-prime deoxy-2-prime-F RNA nucleotides
  modified_base 1^2: mod_base = OTHER; note = Phosphorothioate
  modified_base 2^3: mod_base = OTHER; note = Phosphorothioate
  modified_base 17^18: mod_base = OTHER; note = Phosphorothioate
  modified_base 18^19: mod_base = OTHER; note = Phosphorothioate
gcatgagcagctgttagga

SEQ ID NO: 431 - RNA, 19 nt, synthetic construct
  source 1..19: mol_type = other RNA
  ncRNA 1..19: ncRNA_class = siRNA
  modified_base order(1..6,10..19): mod_base = OTHER; note = 2-prime-O-Methyl RNA nucleotides
  modified_base 7..9: mod_base = OTHER; note = 2-prime deoxy-2-prime-F RNA nucleotides
  modified_base 1^2: mod_base = OTHER; note = Phosphorothioate
  modified_base 2^3: mod_base = OTHER; note = Phosphorothioate
  modified_base 17^18: mod_base = OTHER; note = Phosphorothioate
  modified_base 18^19: mod_base = OTHER; note = Phosphorothioate
tcctaacagctgctcatgc

SEQ ID NO: 432 - RNA, 19 nt, synthetic construct
  source 1..19: mol_type = other RNA
  ncRNA 1..19: ncRNA_class = siRNA
  modified_base order(1,3,5,7,9,11,13,15,17,19): mod_base = OTHER; note = 2-prime-O-Methyl RNA nucleotides
  modified_base order(2,4,6,8,10,12,14,16,18): mod_base = OTHER; note = 2-prime deoxy-2-prime-F RNA nucleotides
  modified_base 1^2: mod_base = OTHER; note = Phosphorothioate
  modified_base 2^3: mod_base = OTHER; note = Phosphorothioate
  modified_base 17^18: mod_base = OTHER; note = Phosphorothioate
  modified_base 18^19: mod_base = OTHER; note = Phosphorothioate
ggacactattcctcccaca

SEQ ID NO: 433 - RNA, 19 nt, synthetic construct
  source 1..19: mol_type = other RNA
  ncRNA 1..19: ncRNA_class = siRNA
  modified_base order(1..6,10..19): mod_base = OTHER; note = 2-prime-O-Methyl RNA nucleotides
  modified_base 7..9: mod_base = OTHER; note = 2-prime deoxy-2-prime-F RNA nucleotides
  modified_base 1^2: mod_base = OTHER; note = Phosphorothioate
  modified_base 2^3: mod_base = OTHER; note = Phosphorothioate
  modified_base 17^18: mod_base = OTHER; note = Phosphorothioate
  modified_base 18^19: mod_base = OTHER; note = Phosphorothioate
tgtgggaggaatagtgtcc

SEQ ID NO: 434 - RNA, 19 nt, synthetic construct
  source 1..19: mol_type = other RNA
  ncRNA 1..19: ncRNA_class = siRNA
  modified_base order(1,3,5,7,9,11,13,15,17,19): mod_base = OTHER; note = 2-prime-O-Methyl RNA nucleotides
  modified_base order(2,4,6,8,10,12,14,16,18): mod_base = OTHER; note = 2-prime deoxy-2-prime-F RNA nucleotides
  modified_base 1^2: mod_base = OTHER; note = Phosphorothioate
  modified_base 2^3: mod_base = OTHER; note = Phosphorothioate
  modified_base 17^18: mod_base = OTHER; note = Phosphorothioate
  modified_base 18^19: mod_base = OTHER; note = Phosphorothioate
tgtctccacatcgaaggac

SEQ ID NO: 435 - RNA, 19 nt, synthetic construct
  source 1..19: mol_type = other RNA
  ncRNA 1..19: ncRNA_class = siRNA
  modified_base order(1..6,10..19): mod_base = OTHER; note = 2-prime-O-Methyl RNA nucleotides
  modified_base 7..9: mod_base = OTHER; note = 2-prime deoxy-2-prime-F RNA nucleotides
  modified_base 1^2: mod_base = OTHER; note = Phosphorothioate
  modified_base 2^3: mod_base = OTHER; note = Phosphorothioate
  modified_base 17^18: mod_base = OTHER; note = Phosphorothioate
  modified_base 18^19: mod_base = OTHER; note = Phosphorothioate
gtccttcgatgtggagaca

SEQ ID NO: 436 - RNA, 19 nt, synthetic construct
  source 1..19: mol_type = other RNA
  ncRNA 1..19: ncRNA_class = siRNA
  modified_base order(1,3,5,7,9,11,13,15,17,19): mod_base = OTHER; note = 2-prime-O-Methyl RNA nucleotides
  modified_base order(2,4,6,8,10,12,14,16,18): mod_base = OTHER; note = 2-prime deoxy-2-prime-F RNA nucleotides
  modified_base 1^2: mod_base = OTHER; note = Phosphorothioate
  modified_base 2^3: mod_base = OTHER; note = Phosphorothioate
  modified_base 17^18: mod_base = OTHER; note = Phosphorothioate
  modified_base 18^19: mod_base = OTHER; note = Phosphorothioate
gtgacaaaggtgatggtca

SEQ ID NO: 437 - RNA, 19 nt, synthetic construct
  source 1..19: mol_type = other RNA
  ncRNA 1..19: ncRNA_class = siRNA
  modified_base order(1..6,10..19): mod_base = OTHER; note = 2-prime-O-Methyl RNA nucleotides
  modified_base 7..9: mod_base = OTHER; note = 2-prime deoxy-2-prime-F RNA nucleotides
  modified_base 1^2: mod_base = OTHER; note = Phosphorothioate
  modified_base 2^3: mod_base = OTHER; note = Phosphorothioate
  modified_base 17^18: mod_base = OTHER; note = Phosphorothioate
  modified_base 18^19: mod_base = OTHER; note = Phosphorothioate
tgaccatcacctttgtcac

SEQ ID NO: 438 - RNA, 19 nt, synthetic construct
  source 1..19: mol_type = other RNA
  ncRNA 1..19: ncRNA_class = siRNA
  modified_base order(1,3,5,7,9,11,13,15,17,19): mod_base = OTHER; note = 2-prime-O-Methyl RNA nucleotides
  modified_base order(2,4,6,8,10,12,14,16,18): mod_base = OTHER; note = 2-prime deoxy-2-prime-F RNA nucleotides
  modified_base 1^2: mod_base = OTHER; note = Phosphorothioate
  modified_base 2^3: mod_base = OTHER; note = Phosphorothioate
  modified_base 17^18: mod_base = OTHER; note = Phosphorothioate
  modified_base 18^19: mod_base = OTHER; note = Phosphorothioate
ctcttcacagctgtactga

SEQ ID NO: 439 - RNA, 19 nt, synthetic construct
  source 1..19: mol_type = other RNA
  ncRNA 1..19: ncRNA_class = siRNA
  modified_base order(1..6,10..19): mod_base = OTHER; note = 2-prime-O-Methyl RNA nucleotides
  modified_base 7..9: mod_base = OTHER; note = 2-prime deoxy-2-prime-F RNA nucleotides
  modified_base 1^2: mod_base = OTHER; note = Phosphorothioate
  modified_base 2^3: mod_base = OTHER; note = Phosphorothioate
  modified_base 17^18: mod_base = OTHER; note = Phosphorothioate
  modified_base 18^19: mod_base = OTHER; note = Phosphorothioate
tcagtacagctgtgaagag

SEQ ID NO: 440 - RNA, 19 nt, synthetic construct
  source 1..19: mol_type = other RNA
  ncRNA 1..19: ncRNA_class = siRNA
  modified_base order(1,3,5,7,9,11,13,15,17,19): mod_base = OTHER; note = 2-prime-O-Methyl RNA nucleotides
  modified_base order(2,4,6,8,10,12,14,16,18): mod_base = OTHER; note = 2-prime deoxy-2-prime-F RNA nucleotides
  modified_base 1^2: mod_base = OTHER; note = Phosphorothioate
  modified_base 2^3: mod_base = OTHER; note = Phosphorothioate
  modified_base 17^18: mod_base = OTHER; note = Phosphorothioate
  modified_base 18^19: mod_base = OTHER; note = Phosphorothioate
aaggtctcttcacagctgt

SEQ ID NO: 441 - RNA, 19 nt, synthetic construct
  source 1..19: mol_type = other RNA
  ncRNA 1..19: ncRNA_class = siRNA
  modified_base order(1..6,10..19): mod_base = OTHER; note = 2-prime-O-Methyl RNA nucleotides
  modified_base 7..9: mod_base = OTHER; note = 2-prime deoxy-2-prime-F RNA nucleotides
  modified_base 1^2: mod_base = OTHER; note = Phosphorothioate
  modified_base 2^3: mod_base = OTHER; note = Phosphorothioate
  modified_base 17^18: mod_base = OTHER; note = Phosphorothioate
  modified_base 18^19: mod_base = OTHER; note = Phosphorothioate
acagctgtgaagagacctt

SEQ ID NO: 442 - RNA, 19 nt, synthetic construct
  source 1..19: mol_type = other RNA
  ncRNA 1..19: ncRNA_class = siRNA
  modified_base order(1,3,5,7,9,11,13,15,17,19): mod_base = OTHER; note = 2-prime-O-Methyl RNA nucleotides
  modified_base order(2,4,6,8,10,12,14,16,18): mod_base = OTHER; note = 2-prime deoxy-2-prime-F RNA nucleotides
  modified_base 1^2: mod_base = OTHER; note = Phosphorothioate
  modified_base 2^3: mod_base = OTHER; note = Phosphorothioate
  modified_base 17^18: mod_base = OTHER; note = Phosphorothioate
  modified_base 18^19: mod_base = OTHER; note = Phosphorothioate
gcatagaaggcctcgaacc

SEQ ID NO: 443 - RNA, 19 nt, synthetic construct
  source 1..19: mol_type = other RNA
  ncRNA 1..19: ncRNA_class = siRNA
  modified_base order(1..6,10..19): mod_base = OTHER; note = 2-prime-O-Methyl RNA nucleotides
  modified_base 7..9: mod_base = OTHER; note = 2-prime deoxy-2-prime-F RNA nucleotides
  modified_base 1^2: mod_base = OTHER; note = Phosphorothioate
  modified_base 2^3: mod_base = OTHER; note = Phosphorothioate
  modified_base 17^18: mod_base = OTHER; note = Phosphorothioate
  modified_base 18^19: mod_base = OTHER; note = Phosphorothioate
ggttcgaggccttctatgc

SEQ ID NO: 444 - RNA, 19 nt, synthetic construct
  source 1..19: mol_type = other RNA
  ncRNA 1..19: ncRNA_class = siRNA
  modified_base order(1,3,5,7,9,11,13,15,17,19): mod_base = OTHER; note = 2-prime-O-Methyl RNA nucleotides
  modified_base order(2,4,6,8,10,12,14,16,18): mod_base = OTHER; note = 2-prime deoxy-2-prime-F RNA nucleotides
  modified_base 1^2: mod_base = OTHER; note = Phosphorothioate
  modified_base 2^3: mod_base = OTHER; note = Phosphorothioate
  modified_base 17^18: mod_base = OTHER; note = Phosphorothioate
  modified_base 18^19: mod_base = OTHER; note = Phosphorothioate
gtagatcatcaggagggcc

SEQ ID NO: 445 - RNA, 19 nt, synthetic construct
  source 1..19: mol_type = other RNA
  ncRNA 1..19: ncRNA_class = siRNA
  modified_base order(1..6,10..19): mod_base = OTHER; note = 2-prime-O-Methyl RNA nucleotides
  modified_base 7..9: mod_base = OTHER; note = 2-prime deoxy-2-prime-F RNA nucleotides
  modified_base 1^2: mod_base = OTHER; note = Phosphorothioate
  modified_base 2^3: mod_base = OTHER; note = Phosphorothioate
  modified_base 17^18: mod_base = OTHER; note = Phosphorothioate
  modified_base 18^19: mod_base = OTHER; note = Phosphorothioate
ggccctcctgatgatctac

SEQ ID NO: 446 - RNA, 19 nt, synthetic construct
  source 1..19: mol_type = other RNA
  ncRNA 1..19: ncRNA_class = siRNA
  modified_base order(1,3,5,7,9,11,13,15,17,19): mod_base = OTHER; note = 2-prime-O-Methyl RNA nucleotides
  modified_base order(2,4,6,8,10,12,14,16,18): mod_base = OTHER; note = 2-prime deoxy-2-prime-F RNA nucleotides
  modified_base 1^2: mod_base = OTHER; note = Phosphorothioate
  modified_base 2^3: mod_base = OTHER; note = Phosphorothioate
  modified_base 17^18: mod_base = OTHER; note = Phosphorothioate
  modified_base 18^19: mod_base = OTHER; note = Phosphorothioate
gaatcacagctttgtaggt

SEQ ID NO: 447 - RNA, 19 nt, synthetic construct
  source 1..19: mol_type = other RNA
  ncRNA 1..19: ncRNA_class = siRNA
  modified_base order(1..6,10..19): mod_base = OTHER; note = 2-prime-O-Methyl RNA nucleotides
  modified_base 7..9: mod_base = OTHER; note = 2-prime deoxy-2-prime-F RNA nucleotides
  modified_base 1^2: mod_base = OTHER; note = Phosphorothioate
  modified_base 2^3: mod_base = OTHER; note = Phosphorothioate
  modified_base 17^18: mod_base = OTHER; note = Phosphorothioate
  modified_base 18^19: mod_base = OTHER; note = Phosphorothioate
acctacaaagctgtgattc

SEQ ID NO: 448 - RNA, 19 nt, synthetic construct
  source 1..19: mol_type = other RNA
  ncRNA 1..19: ncRNA_class = siRNA
  modified_base order(1,3,5,7,9,11,13,15,17,19): mod_base = OTHER; note = 2-prime-O-Methyl RNA nucleotides
  modified_base order(2,4,6,8,10,12,14,16,18): mod_base = OTHER; note = 2-prime deoxy-2-prime-F RNA nucleotides
  modified_base 1^2: mod_base = OTHER; note = Phosphorothioate
  modified_base 2^3: mod_base = OTHER; note = Phosphorothioate
  modified_base 17^18: mod_base = OTHER; note = Phosphorothioate
  modified_base 18^19: mod_base = OTHER; note = Phosphorothioate
aatcacagctttgtaggtg

SEQ ID NO: 449 - RNA, 19 nt, synthetic construct
  source 1..19: mol_type = other RNA
  ncRNA 1..19: ncRNA_class = siRNA
  modified_base order(1..6,10..19): mod_base = OTHER; note = 2-prime-O-Methyl RNA nucleotides
  modified_base 7..9: mod_base = OTHER; note = 2-prime deoxy-2-prime-F RNA nucleotides
  modified_base 1^2: mod_base = OTHER; note = Phosphorothioate
  modified_base 2^3: mod_base = OTHER; note = Phosphorothioate
  modified_base 17^18: mod_base = OTHER; note = Phosphorothioate
  modified_base 18^19: mod_base = OTHER; note = Phosphorothioate
cacctacaaagctgtgatt

SEQ ID NO: 450 - RNA, 19 nt, synthetic construct
  source 1..19: mol_type = other RNA
  ncRNA 1..19: ncRNA_class = siRNA
  modified_base order(1,3,5,7,9,11,13,15,17,19): mod_base = OTHER; note = 2-prime-O-Methyl RNA nucleotides
  modified_base order(2,4,6,8,10,12,14,16,18): mod_base = OTHER; note = 2-prime deoxy-2-prime-F RNA nucleotides
  modified_base 1^2: mod_base = OTHER; note = Phosphorothioate
  modified_base 2^3: mod_base = OTHER; note = Phosphorothioate
  modified_base 17^18: mod_base = OTHER; note = Phosphorothioate
  modified_base 18^19: mod_base = OTHER; note = Phosphorothioate
ttaatcagtgctatgtcat

SEQ ID NO: 451 - RNA, 19 nt, synthetic construct
  source 1..19: mol_type = other RNA
  ncRNA 1..19: ncRNA_class = siRNA
  modified_base order(1..6,10..19): mod_base = OTHER; note = 2-prime-O-Methyl RNA nucleotides
  modified_base 7..9: mod_base = OTHER; note = 2-prime deoxy-2-prime-F RNA nucleotides
  modified_base 1^2: mod_base = OTHER; note = Phosphorothioate
  modified_base 2^3: mod_base = OTHER; note = Phosphorothioate
  modified_base 17^18: mod_base = OTHER; note = Phosphorothioate
  modified_base 18^19: mod_base = OTHER; note = Phosphorothioate
atgacatagcactgattaa

SEQ ID NO: 452 - RNA, 19 nt, synthetic construct
  source 1..19: mol_type = other RNA
  ncRNA 1..19: ncRNA_class = siRNA
  modified_base order(1,3,5,7,9,11,13,15,17,19): mod_base = OTHER; note = 2-prime-O-Methyl RNA nucleotides
  modified_base order(2,4,6,8,10,12,14,16,18): mod_base = OTHER; note = 2-prime deoxy-2-prime-F RNA nucleotides
  modified_base 1^2: mod_base = OTHER; note = Phosphorothioate
  modified_base 2^3: mod_base = OTHER; note = Phosphorothioate
  modified_base 17^18: mod_base = OTHER; note = Phosphorothioate
  modified_base 18^19: mod_base = OTHER; note = Phosphorothioate
ttatgttctcgatccaggg

SEQ ID NO: 453 - RNA, 19 nt, synthetic construct
  source 1..19: mol_type = other RNA
  ncRNA 1..19: ncRNA_class = siRNA
  modified_base order(1..6,10..19): mod_base = OTHER; note = 2-prime-O-Methyl RNA nucleotides
  modified_base 7..9: mod_base = OTHER; note = 2-prime deoxy-2-prime-F RNA nucleotides
  modified_base 1^2: mod_base = OTHER; note = Phosphorothioate
  modified_base 2^3: mod_base = OTHER; note = Phosphorothioate
  modified_base 17^18: mod_base = OTHER; note = Phosphorothioate
  modified_base 18^19: mod_base = OTHER; note = Phosphorothioate
ccctggatcgagaacataa

SEQ ID NO: 454 - RNA, 19 nt, synthetic construct
  source 1..19: mol_type = other RNA
  ncRNA 1..19: ncRNA_class = siRNA
  modified_base order(1,3,5,7,9,11,13,15,17,19): mod_base = OTHER; note = 2-prime-O-Methyl RNA nucleotides
  modified_base order(2,4,6,8,10,12,14,16,18): mod_base = OTHER; note = 2-prime deoxy-2-prime-F RNA nucleotides
  modified_base 1^2: mod_base = OTHER; note = Phosphorothioate
  modified_base 2^3: mod_base = OTHER; note = Phosphorothioate
  modified_base 17^18: mod_base = OTHER; note = Phosphorothioate
  modified_base 18^19: mod_base = OTHER; note = Phosphorothioate
ttgccaaggaaaatcacca

SEQ ID NO: 455 - RNA, 19 nt, synthetic construct
  source 1..19: mol_type = other RNA
  ncRNA 1..19: ncRNA_class = siRNA
  modified_base order(1..6,10..19): mod_base = OTHER; note = 2-prime-O-Methyl RNA nucleotides
  modified_base 7..9: mod_base = OTHER; note = 2-prime deoxy-2-prime-F RNA nucleotides
  modified_base 1^2: mod_base = OTHER; note = Phosphorothioate
  modified_base 2^3: mod_base = OTHER; note = Phosphorothioate
  modified_base 17^18: mod_base = OTHER; note = Phosphorothioate
  modified_base 18^19: mod_base = OTHER; note = Phosphorothioate
tggtgattttccttggcaa

SEQ ID NO: 456 - RNA, 19 nt, synthetic construct
  source 1..19: mol_type = other RNA
  ncRNA 1..19: ncRNA_class = siRNA
  modified_base order(1,3,5,7,9,11,13,15,17,19): mod_base = OTHER; note = 2-prime-O-Methyl RNA nucleotides
  modified_base order(2,4,6,8,10,12,14,16,18): mod_base = OTHER; note = 2-prime deoxy-2-prime-F RNA nucleotides
  modified_base 1^2: mod_base = OTHER; note = Phosphorothioate
  modified_base 2^3: mod_base = OTHER; note = Phosphorothioate
  modified_base 17^18: mod_base = OTHER; note = Phosphorothioate
  modified_base 18^19: mod_base = OTHER; note = Phosphorothioate
cacaggttcaggccacttc

SEQ ID NO: 457 - RNA, 19 nt, synthetic construct
  source 1..19: mol_type = other RNA
  ncRNA 1..19: ncRNA_class = siRNA
  modified_base order(1..6,10..19): mod_base = OTHER; note = 2-prime-O-Methyl RNA nucleotides
  modified_base 7..9: mod_base = OTHER; note = 2-prime deoxy-2-prime-F RNA nucleotides
  modified_base 1^2: mod_base = OTHER; note = Phosphorothioate
  modified_base 2^3: mod_base = OTHER; note = Phosphorothioate
  modified_base 17^18: mod_base = OTHER; note = Phosphorothioate
  modified_base 18^19: mod_base = OTHER; note = Phosphorothioate
gaagtggcctgaacctgtg

SEQ ID NO: 458 - RNA, 19 nt, synthetic construct
  source 1..19: mol_type = other RNA
  ncRNA 1..19: ncRNA_class = siRNA
  modified_base order(1,3,5,7,9,11,13,15,17,19): mod_base = OTHER; note = 2-prime-O-Methyl RNA nucleotides
  modified_base order(2,4,6,8,10,12,14,16,18): mod_base = OTHER; note = 2-prime deoxy-2-prime-F RNA nucleotides
  modified_base 1^2: mod_base = OTHER; note = Phosphorothioate
  modified_base 2^3: mod_base = OTHER; note = Phosphorothioate
  modified_base 17^18: mod_base = OTHER; note = Phosphorothioate
  modified_base 18^19: mod_base = OTHER; note = Phosphorothioate
cagcacaaagcatgttagc

SEQ ID NO: 459 - RNA, 19 nt, synthetic construct
  source 1..19: mol_type = other RNA
  ncRNA 1..19: ncRNA_class = siRNA
  modified_base order(1..6,10..19): mod_base = OTHER; note = 2-prime-O-Methyl RNA nucleotides
  modified_base 7..9: mod_base = OTHER; note = 2-prime deoxy-2-prime-F RNA nucleotides
  modified_base 1^2: mod_base = OTHER; note = Phosphorothioate
  modified_base 2^3: mod_base = OTHER; note = Phosphorothioate
  modified_base 17^18: mod_base = OTHER; note = Phosphorothioate
  modified_base 18^19: mod_base = OTHER; note = Phosphorothioate
gctaacatgctttgtgctg

SEQ ID NO: 460 - RNA, 19 nt, synthetic construct
  source 1..19: mol_type = other RNA
  ncRNA 1..19: ncRNA_class = siRNA
  modified_base order(1,3,5,7,9,11,13,15,17,19): mod_base = OTHER; note = 2-prime-O-Methyl RNA nucleotides
  modified_base order(2,4,6,8,10,12,14,16,18): mod_base = OTHER; note = 2-prime deoxy-2-prime-F RNA nucleotides
  modified_base 1^2: mod_base = OTHER; note = Phosphorothioate
  modified_base 2^3: mod_base = OTHER; note = Phosphorothioate
  modified_base 17^18: mod_base = OTHER; note = Phosphorothioate
  modified_base 18^19: mod_base = OTHER; note = Phosphorothioate
cacatcgaaggactccaca

SEQ ID NO: 461 - RNA, 19 nt, synthetic construct
  source 1..19: mol_type = other RNA
  ncRNA 1..19: ncRNA_class = siRNA
  modified_base order(1..6,10..19): mod_base = OTHER; note = 2-prime-O-Methyl RNA nucleotides
  modified_base 7..9: mod_base = OTHER; note = 2-prime deoxy-2-prime-F RNA nucleotides
  modified_base 1^2: mod_base = OTHER; note = Phosphorothioate
  modified_base 2^3: mod_base = OTHER; note = Phosphorothioate
  modified_base 17^18: mod_base = OTHER; note = Phosphorothioate
  modified_base 18^19: mod_base = OTHER; note = Phosphorothioate
tgtggagtccttcgatgtg

SEQ ID NO: 462 - RNA, 19 nt, synthetic construct
  source 1..19: mol_type = other RNA
  ncRNA 1..19: ncRNA_class = siRNA
  modified_base order(1,3,5,7,9,11,13,15,17,19): mod_base = OTHER; note = 2-prime-O-Methyl RNA nucleotides
  modified_base order(2,4,6,8,10,12,14,16,18): mod_base = OTHER; note = 2-prime deoxy-2-prime-F RNA nucleotides
  modified_base 1^2: mod_base = OTHER; note = Phosphorothioate
  modified_base 2^3: mod_base = OTHER; note = Phosphorothioate
  modified_base 17^18: mod_base = OTHER; note = Phosphorothioate
  modified_base 18^19: mod_base = OTHER; note = Phosphorothioate
ttgtgtagactccatactg

SEQ ID NO: 463 - RNA, 19 nt, synthetic construct
  source 1..19: mol_type = other RNA
  ncRNA 1..19: ncRNA_class = siRNA
  modified_base order(1..6,10..19): mod_base = OTHER; note = 2-prime-O-Methyl RNA nucleotides
  modified_base 7..9: mod_base = OTHER; note = 2-prime deoxy-2-prime-F RNA nucleotides
  modified_base 1^2: mod_base = OTHER; note = Phosphorothioate
  modified_base 2^3: mod_base = OTHER; note = Phosphorothioate
  modified_base 17^18: mod_base = OTHER; note = Phosphorothioate
  modified_base 18^19: mod_base = OTHER; note = Phosphorothioate
cagtatggagtctacacaa

SEQ ID NO: 464 - RNA, 19 nt, synthetic construct
  source 1..19: mol_type = other RNA
  ncRNA 1..19: ncRNA_class = siRNA
  modified_base order(1,3,5,7,9,11,13,15,17,19): mod_base = OTHER; note = 2-prime-O-Methyl RNA nucleotides
  modified_base order(2,4,6,8,10,12,14,16,18): mod_base = OTHER; note = 2-prime deoxy-2-prime-F RNA nucleotides
  modified_base 1^2: mod_base = OTHER; note = Phosphorothioate
  modified_base 2^3: mod_base = OTHER; note = Phosphorothioate
  modified_base 17^18: mod_base = OTHER; note = Phosphorothioate
  modified_base 18^19: mod_base = OTHER; note = Phosphorothioate
cacaattcatggaacccca

SEQ ID NO: 465 - RNA, 19 nt, synthetic construct
  source 1..19: mol_type = other RNA
  ncRNA 1..19: ncRNA_class = siRNA
  modified_base order(1..6,10..19): mod_base = OTHER; note = 2-prime-O-Methyl RNA nucleotides
  modified_base 7..9: mod_base = OTHER; note = 2-prime deoxy-2-prime-F RNA nucleotides
  modified_base 1^2: mod_base = OTHER; note = Phosphorothioate
  modified_base 2^3: mod_base = OTHER; note = Phosphorothioate
  modified_base 17^18: mod_base = OTHER; note = Phosphorothioate
  modified_base 18^19: mod_base = OTHER; note = Phosphorothioate
tggggttccatgaattgtg

SEQ ID NO: 466 - RNA, 19 nt, synthetic construct
  source 1..19: mol_type = other RNA
  ncRNA 1..19: ncRNA_class = siRNA
  modified_base order(1,3,5,7,9,11,13,15,17,19): mod_base = OTHER; note = 2-prime-O-Methyl RNA nucleotides
  modified_base order(2,4,6,8,10,12,14,16,18): mod_base = OTHER; note = 2-prime deoxy-2-prime-F RNA nucleotides
  modified_base 1^2: mod_base = OTHER; note = Phosphorothioate
  modified_base 2^3: mod_base = OTHER; note = Phosphorothioate
  modified_base 17^18: mod_base = OTHER; note = Phosphorothioate
  modified_base 18^19: mod_base = OTHER; note = Phosphorothioate
tccacaaacaggctcacag

SEQ ID NO: 467 - RNA, 19 nt, synthetic construct
  source 1..19: mol_type = other RNA
  ncRNA 1..19: ncRNA_class = siRNA
  modified_base order(1..6,10..19): mod_base = OTHER; note = 2-prime-O-Methyl RNA nucleotides
  modified_base 7..9: mod_base = OTHER; note = 2-prime deoxy-2-prime-F RNA nucleotides
  modified_base 1^2: mod_base = OTHER; note = Phosphorothioate
  modified_base 2^3: mod_base = OTHER; note = Phosphorothioate
  modified_base 17^18: mod_base = OTHER; note = Phosphorothioate
  modified_base 18^19: mod_base = OTHER; note = Phosphorothioate
ctgtgagcctgtttgtgga

SEQ ID NO: 468 - RNA, 19 nt, synthetic construct
  source 1..19: mol_type = other RNA
  ncRNA 1..19: ncRNA_class = siRNA
  modified_base order(1,3,5,7,9,11,13,15,17,19): mod_base = OTHER; note = 2-prime-O-Methyl RNA nucleotides
  modified_base order(2,4,6,8,10,12,14,16,18): mod_base = OTHER; note = 2-prime deoxy-2-prime-F RNA nucleotides
  modified_base 1^2: mod_base = OTHER; note = Phosphorothioate
  modified_base 2^3: mod_base = OTHER; note = Phosphorothioate
  modified_base 17^18: mod_base = OTHER; note = Phosphorothioate
  modified_base 18^19: mod_base = OTHER; note = Phosphorothioate
acaggttcaggccacttcg

SEQ ID NO: 469 - RNA, 19 nt, synthetic construct
  source 1..19: mol_type = other RNA
  ncRNA 1..19: ncRNA_class = siRNA
  modified_base order(1..6,10..19): mod_base = OTHER; note = 2-prime-O-Methyl RNA nucleotides
  modified_base 7..9: mod_base = OTHER; note = 2-prime deoxy-2-prime-F RNA nucleotides
  modified_base 1^2: mod_base = OTHER; note = Phosphorothioate
  modified_base 2^3: mod_base = OTHER; note = Phosphorothioate
  modified_base 17^18: mod_base = OTHER; note = Phosphorothioate
  modified_base 18^19: mod_base = OTHER; note = Phosphorothioate
cgaagtggcctgaacctgt

SEQ ID NO: 470 - RNA, 19 nt, synthetic construct
  source 1..19: mol_type = other RNA
  ncRNA 1..19: ncRNA_class = siRNA
  modified_base order(1,3,5,7,9,11,13,15,17,19): mod_base = OTHER; note = 2-prime-O-Methyl RNA nucleotides
  modified_base order(2,4,6,8,10,12,14,16,18): mod_base = OTHER; note = 2-prime deoxy-2-prime-F RNA nucleotides
  modified_base 1^2: mod_base = OTHER; note = Phosphorothioate
  modified_base 2^3: mod_base = OTHER; note = Phosphorothioate
  modified_base 17^18: mod_base = OTHER; note = Phosphorothioate
  modified_base 18^19: mod_base = OTHER; note = Phosphorothioate
ctgtactgaatcacagctt

SEQ ID NO: 471 - RNA, 19 nt, synthetic construct
  source 1..19: mol_type = other RNA
  ncRNA 1..19: ncRNA_class = siRNA
  modified_base order(1..6,10..19): mod_base = OTHER; note = 2-prime-O-Methyl RNA nucleotides
  modified_base 7..9: mod_base = OTHER; note = 2-prime deoxy-2-prime-F RNA nucleotides
  modified_base 1^2: mod_base = OTHER; note = Phosphorothioate
  modified_base 2^3: mod_base = OTHER; note = Phosphorothioate
  modified_base 17^18: mod_base = OTHER; note = Phosphorothioate
  modified_base 18^19: mod_base = OTHER; note = Phosphorothioate
aagctgtgattcagtacag

SEQ ID NO: 472 - RNA, 19 nt, synthetic construct
  source 1..19: mol_type = other RNA
  ncRNA 1..19: ncRNA_class = siRNA
  modified_base order(1,3,5,7,9,11,13,15,17,19): mod_base = OTHER; note = 2-prime-O-Methyl RNA nucleotides
  modified_base order(2,4,6,8,10,12,14,16,18): mod_base = OTHER; note = 2-prime deoxy-2-prime-F RNA nucleotides
  modified_base 1^2: mod_base = OTHER; note = Phosphorothioate
  modified_base 2^3: mod_base = OTHER; note = Phosphorothioate
  modified_base 17^18: mod_base = OTHER; note = Phosphorothioate
  modified_base 18^19: mod_base = OTHER; note = Phosphorothioate
gtctccacatcgaaggact

SEQ ID NO: 473 - RNA, 19 nt, synthetic construct
  source 1..19: mol_type = other RNA
  ncRNA 1..19: ncRNA_class = siRNA
  modified_base order(1..6,10..19): mod_base = OTHER; note = 2-prime-O-Methyl RNA nucleotides
  modified_base 7..9: mod_base = OTHER; note = 2-prime deoxy-2-prime-F RNA nucleotides
  modified_base 1^2: mod_base = OTHER; note = Phosphorothioate
  modified_base 2^3: mod_base = OTHER; note = Phosphorothioate
  modified_base 17^18: mod_base = OTHER; note = Phosphorothioate
  modified_base 18^19: mod_base = OTHER; note = Phosphorothioate
agtccttcgatgtggagac

SEQ ID NO: 474 - RNA, 19 nt, synthetic construct
  source 1..19: mol_type = other RNA
  ncRNA 1..19: ncRNA_class = siRNA
  modified_base order(1,3,5,7,9,11,13,15,17,19): mod_base = OTHER; note = 2-prime-O-Methyl RNA nucleotides
  modified_base order(2,4,6,8,10,12,14,16,18): mod_base = OTHER; note = 2-prime deoxy-2-prime-F RNA nucleotides
  modified_base 1^2: mod_base = OTHER; note = Phosphorothioate
  modified_base 2^3: mod_base = OTHER; note = Phosphorothioate
  modified_base 17^18: mod_base = OTHER; note = Phosphorothioate
  modified_base 18^19: mod_base = OTHER; note = Phosphorothioate
tcgtccagaatccatcagc

SEQ ID NO: 475 - RNA, 19 nt, synthetic construct
  source 1..19: mol_type = other RNA
  ncRNA 1..19: ncRNA_class = siRNA
  modified_base order(1..6,10..19): mod_base = OTHER; note = 2-prime-O-Methyl RNA nucleotides
  modified_base 7..9: mod_base = OTHER; note = 2-prime deoxy-2-prime-F RNA nucleotides
  modified_base 1^2: mod_base = OTHER; note = Phosphorothioate
  modified_base 2^3: mod_base = OTHER; note = Phosphorothioate
  modified_base 17^18: mod_base = OTHER; note = Phosphorothioate
  modified_base 18^19: mod_base = OTHER; note = Phosphorothioate
gctgatggattctggacga

SEQ ID NO: 476 - RNA, 19 nt, synthetic construct
  source 1..19: mol_type = other RNA
  ncRNA 1..19: ncRNA_class = siRNA
  modified_base order(1,3,5,7,9,11,13,15,17,19): mod_base = OTHER; note = 2-prime-O-Methyl RNA nucleotides
  modified_base order(2,4,6,8,10,12,14,16,18): mod_base = OTHER; note = 2-prime deoxy-2-prime-F RNA nucleotides
  modified_base 1^2: mod_base = OTHER; note = Phosphorothioate
  modified_base 2^3: mod_base = OTHER; note = Phosphorothioate
  modified_base 17^18: mod_base = OTHER; note = Phosphorothioate
  modified_base 18^19: mod_base = OTHER; note = Phosphorothioate
cccaagatccatctttctg

SEQ ID NO: 477 - RNA, 19 nt, synthetic construct
  source 1..19: mol_type = other RNA
  ncRNA 1..19: ncRNA_class = siRNA
  modified_base order(1..6,10..19): mod_base = OTHER; note = 2-prime-O-Methyl RNA nucleotides
  modified_base 7..9: mod_base = OTHER; note = 2-prime deoxy-2-prime-F RNA nucleotides
  modified_base 1^2: mod_base = OTHER; note = Phosphorothioate
  modified_base 2^3: mod_base = OTHER; note = Phosphorothioate
  modified_base 17^18: mod_base = OTHER; note = Phosphorothioate
  modified_base 18^19: mod_base = OTHER; note = Phosphorothioate
cagaaagatggatcttggg

SEQ ID NO: 478 - RNA, 19 nt, synthetic construct
  source 1..19: mol_type = other RNA
  ncRNA 1..19: ncRNA_class = siRNA
  modified_base order(1,3,5,7,9,11,13,15,17,19): mod_base = OTHER; note = 2-prime-O-Methyl RNA nucleotides
  modified_base order(2,4,6,8,10,12,14,16,18): mod_base = OTHER; note = 2-prime deoxy-2-prime-F RNA nucleotides
  modified_base 1^2: mod_base = OTHER; note = Phosphorothioate
  modified_base 2^3: mod_base = OTHER; note = Phosphorothioate
  modified_base 17^18: mod_base = OTHER; note = Phosphorothioate
  modified_base 18^19: mod_base = OTHER; note = Phosphorothioate
aagtgggtgaagtagaggc

SEQ ID NO: 479 - RNA, 19 nt, synthetic construct
  source 1..19: mol_type = other RNA
  ncRNA 1..19: ncRNA_class = siRNA
  modified_base order(1..6,10..19): mod_base = OTHER; note = 2-prime-O-Methyl RNA nucleotides
  modified_base 7..9: mod_base = OTHER; note = 2-prime deoxy-2-prime-F RNA nucleotides
  modified_base 1^2: mod_base = OTHER; note = Phosphorothioate
  modified_base 2^3: mod_base = OTHER; note = Phosphorothioate
  modified_base 17^18: mod_base = OTHER; note = Phosphorothioate
  modified_base 18^19: mod_base = OTHER; note = Phosphorothioate
gcctctacttcacccactt

SEQ ID NO: 480 - RNA, 19 nt, synthetic construct
  source 1..19: mol_type = other RNA
  ncRNA 1..19: ncRNA_class = siRNA
  modified_base order(1,3,5,7,9,11,13,15,17,19): mod_base = OTHER; note = 2-prime-O-Methyl RNA nucleotides
  modified_base order(2,4,6,8,10,12,14,16,18): mod_base = OTHER; note = 2-prime deoxy-2-prime-F RNA nucleotides
  modified_base 1^2: mod_base = OTHER; note = Phosphorothioate
  modified_base 2^3: mod_base = OTHER; note = Phosphorothioate
  modified_base 17^18: mod_base = OTHER; note = Phosphorothioate
  modified_base 18^19: mod_base = OTHER; note = Phosphorothioate
cattagatttctagcaaga

SEQ ID NO: 481 - RNA, 19 nt, synthetic construct
  source 1..19: mol_type = other RNA
  ncRNA 1..19: ncRNA_class = siRNA
  modified_base order(1..6,10..19): mod_base = OTHER; note = 2-prime-O-Methyl RNA nucleotides
  modified_base 7..9: mod_base = OTHER; note = 2-prime deoxy-2-prime-F RNA nucleotides
  modified_base 1^2: mod_base = OTHER; note = Phosphorothioate
  modified_base 2^3: mod_base = OTHER; note = Phosphorothioate
  modified_base 17^18: mod_base = OTHER; note = Phosphorothioate
  modified_base 18^19: mod_base = OTHER; note = Phosphorothioate
tcttgctagaaatctaatg

SEQ ID NO: 482 - RNA, 19 nt, synthetic construct
  source 1..19: mol_type = other RNA
  ncRNA 1..19: ncRNA_class = siRNA
  modified_base order(1,3,5,7,9,11,13,15,17,19): mod_base = OTHER; note = 2-prime-O-Methyl RNA nucleotides
  modified_base order(2,4,6,8,10,12,14,16,18): mod_base = OTHER; note = 2-prime deoxy-2-prime-F RNA nucleotides
  modified_base 1^2: mod_base = OTHER; note = Phosphorothioate
  modified_base 2^3: mod_base = OTHER; note = Phosphorothioate
  modified_base 17^18: mod_base = OTHER; note = Phosphorothioate
  modified_base 18^19: mod_base = OTHER; note = Phosphorothioate
ctccacatcgaaggactcc

SEQ ID NO: 483 - RNA, 19 nt, synthetic construct
  source 1..19: mol_type = other RNA
  ncRNA 1..19: ncRNA_class = siRNA
  modified_base order(1..6,10..19): mod_base = OTHER; note = 2-prime-O-Methyl RNA nucleotides
  modified_base 7..9: mod_base = OTHER; note = 2-prime deoxy-2-prime-F RNA nucleotides
  modified_base 1^2: mod_base = OTHER; note = Phosphorothioate
  modified_base 2^3: mod_base = OTHER; note = Phosphorothioate
  modified_base 17^18: mod_base = OTHER; note = Phosphorothioate
  modified_base 18^19: mod_base = OTHER; note = Phosphorothioate
ggagtccttcgatgtggag

SEQ ID NO: 484 - RNA, 19 nt, synthetic construct
  source 1..19: mol_type = other RNA
  ncRNA 1..19: ncRNA_class = siRNA
  modified_base order(1,3,5,7,9,11,13,15,17,19): mod_base = OTHER; note = 2-prime-O-Methyl RNA nucleotides
  modified_base order(2,4,6,8,10,12,14,16,18): mod_base = OTHER; note = 2-prime deoxy-2-prime-F RNA nucleotides
  modified_base 1^2: mod_base = OTHER; note = Phosphorothioate
  modified_base 2^3: mod_base = OTHER; note = Phosphorothioate
  modified_base 17^18: mod_base = OTHER; note = Phosphorothioate
  modified_base 18^19: mod_base = OTHER; note = Phosphorothioate
cagctgtactgaatcacag

SEQ ID NO: 485 - RNA, 19 nt, synthetic construct
  source 1..19: mol_type = other RNA
  ncRNA 1..19: ncRNA_class = siRNA
  modified_base order(1..6,10..19): mod_base = OTHER; note = 2-prime-O-Methyl RNA nucleotides
  modified_base 7..9: mod_base = OTHER; note = 2-prime deoxy-2-prime-F RNA nucleotides
  modified_base 1^2: mod_base = OTHER; note = Phosphorothioate
  modified_base 2^3: mod_base = OTHER; note = Phosphorothioate
  modified_base 17^18: mod_base = OTHER; note = Phosphorothioate
  modified_base 18^19: mod_base = OTHER; note = Phosphorothioate
ctgtgattcagtacagctg

SEQ ID NO: 486 - RNA, 19 nt, synthetic construct
  source 1..19: mol_type = other RNA
  ncRNA 1..19: ncRNA_class = siRNA
  modified_base order(1,3,5,7,9,11,13,15,17,19): mod_base = OTHER; note = 2-prime-O-Methyl RNA nucleotides
  modified_base order(2,4,6,8,10,12,14,16,18): mod_base = OTHER; note = 2-prime deoxy-2-prime-F RNA nucleotides
  modified_base 1^2: mod_base = OTHER; note = Phosphorothioate
  modified_base 2^3: mod_base = OTHER; note = Phosphorothioate
  modified_base 17^18: mod_base = OTHER; note = Phosphorothioate
  modified_base 18^19: mod_base = OTHER; note = Phosphorothioate
catgagcagctgttaggac

SEQ ID NO: 487 - RNA, 19 nt, synthetic construct
  source 1..19: mol_type = other RNA
  ncRNA 1..19: ncRNA_class = siRNA
  modified_base order(1..6,10..19): mod_base = OTHER; note = 2-prime-O-Methyl RNA nucleotides
  modified_base 7..9: mod_base = OTHER; note = 2-prime deoxy-2-prime-F RNA nucleotides
  modified_base 1^2: mod_base = OTHER; note = Phosphorothioate
  modified_base 2^3: mod_base = OTHER; note = Phosphorothioate
  modified_base 17^18: mod_base = OTHER; note = Phosphorothioate
  modified_base 18^19: mod_base = OTHER; note = Phosphorothioate
gtcctaacagctgctcatg

SEQ ID NO: 488 - RNA, 19 nt, synthetic construct
  source 1..19: mol_type = other RNA
  ncRNA 1..19: ncRNA_class = siRNA
  modified_base order(1,3,5,7,9,11,13,15,17,19): mod_base = OTHER; note = 2-prime-O-Methyl RNA nucleotides
  modified_base order(2,4,6,8,10,12,14,16,18): mod_base = OTHER; note = 2-prime deoxy-2-prime-F RNA nucleotides
  modified_base 1^2: mod_base = OTHER; note = Phosphorothioate
  modified_base 2^3: mod_base = OTHER; note = Phosphorothioate
  modified_base 17^18: mod_base = OTHER; note = Phosphorothioate
  modified_base 18^19: mod_base = OTHER; note = Phosphorothioate
gtctgtttgaatcttgaga

SEQ ID NO: 489 - RNA, 19 nt, synthetic construct
  source 1..19: mol_type = other RNA
  ncRNA 1..19: ncRNA_class = siRNA
  modified_base order(1..6,10..19): mod_base = OTHER; note = 2-prime-O-Methyl RNA nucleotides
  modified_base 7..9: mod_base = OTHER; note = 2-prime deoxy-2-prime-F RNA nucleotides
  modified_base 1^2: mod_base = OTHER; note = Phosphorothioate
  modified_base 2^3: mod_base = OTHER; note = Phosphorothioate
  modified_base 17^18: mod_base = OTHER; note = Phosphorothioate
  modified_base 18^19: mod_base = OTHER; note = Phosphorothioate
tctcaagattcaaacagac

SEQ ID NO: 490 - RNA, 19 nt, synthetic construct
  source 1..19: mol_type = other RNA
  ncRNA 1..19: ncRNA_class = siRNA
  modified_base order(1,3,5,7,9,11,13,15,17,19): mod_base = OTHER; note = 2-prime-O-Methyl RNA nucleotides
  modified_base order(2,4,6,8,10,12,14,16,18): mod_base = OTHER; note = 2-prime deoxy-2-prime-F RNA nucleotides
  modified_base 1^2: mod_base = OTHER; note = Phosphorothioate
  modified_base 2^3: mod_base = OTHER; note = Phosphorothioate
  modified_base 17^18: mod_base = OTHER; note = Phosphorothioate
  modified_base 18^19: mod_base = OTHER; note = Phosphorothioate
cctttggagctcgtccaga

SEQ ID NO: 491 - RNA, 19 nt, synthetic construct
  source 1..19: mol_type = other RNA
  ncRNA 1..19: ncRNA_class = siRNA
  modified_base order(1..6,10..19): mod_base = OTHER; note = 2-prime-O-Methyl RNA nucleotides
  modified_base 7..9: mod_base = OTHER; note = 2-prime deoxy-2-prime-F RNA nucleotides
  modified_base 1^2: mod_base = OTHER; note = Phosphorothioate
  modified_base 2^3: mod_base = OTHER; note = Phosphorothioate
  modified_base 17^18: mod_base = OTHER; note = Phosphorothioate
  modified_base 18^19: mod_base = OTHER; note = Phosphorothioate
tctggacgagctccaaagg

SEQ ID NO: 492 - RNA, 19 nt, synthetic construct
  source 1..19: mol_type = other RNA
  ncRNA 1..19: ncRNA_class = siRNA
  modified_base order(1,3,5,7,9,11,13,15,17,19): mod_base = OTHER; note = 2-prime-O-Methyl RNA nucleotides
  modified_base order(2,4,6,8,10,12,14,16,18): mod_base = OTHER; note = 2-prime deoxy-2-prime-F RNA nucleotides
  modified_base 1^2: mod_base = OTHER; note = Phosphorothioate
  modified_base 2^3: mod_base = OTHER; note = Phosphorothioate
  modified_base 17^18: mod_base = OTHER; note = Phosphorothioate
  modified_base 18^19: mod_base = OTHER; note = Phosphorothioate
gctgttaggacccagttgt

SEQ ID NO: 493 - RNA, 19 nt, synthetic construct
  source 1..19: mol_type = other RNA
  ncRNA 1..19: ncRNA_class = siRNA
  modified_base order(1..6,10..19): mod_base = OTHER; note = 2-prime-O-Methyl RNA nucleotides
  modified_base 7..9: mod_base = OTHER; note = 2-prime deoxy-2-prime-F RNA nucleotides
  modified_base 1^2: mod_base = OTHER; note = Phosphorothioate
  modified_base 2^3: mod_base = OTHER; note = Phosphorothioate
  modified_base 17^18: mod_base = OTHER; note = Phosphorothioate
  modified_base 18^19: mod_base = OTHER; note = Phosphorothioate
acaactgggtcctaacagc

SEQ ID NO: 494 - RNA, 19 nt, synthetic construct
  source 1..19: mol_type = other RNA
  ncRNA 1..19: ncRNA_class = siRNA
  modified_base order(1,3,5,7,9,11,13,15,17,19): mod_base = OTHER; note = 2-prime-O-Methyl RNA nucleotides
  modified_base order(2,4,6,8,10,12,14,16,18): mod_base = OTHER; note = 2-prime deoxy-2-prime-F RNA nucleotides
  modified_base 1^2: mod_base = OTHER; note = Phosphorothioate
  modified_base 2^3: mod_base = OTHER; note = Phosphorothioate
  modified_base 17^18: mod_base = OTHER; note = Phosphorothioate
  modified_base 18^19: mod_base = OTHER; note = Phosphorothioate
ggtagatcatcaggagggc

SEQ ID NO: 495 - RNA, 19 nt, synthetic construct
  source 1..19: mol_type = other RNA
  ncRNA 1..19: ncRNA_class = siRNA
  modified_base order(1..6,10..19): mod_base = OTHER; note = 2-prime-O-Methyl RNA nucleotides
  modified_base 7..9: mod_base = OTHER; note = 2-prime deoxy-2-prime-F RNA nucleotides
  modified_base 1^2: mod_base = OTHER; note = Phosphorothioate
  modified_base 2^3: mod_base = OTHER; note = Phosphorothioate
  modified_base 17^18: mod_base = OTHER; note = Phosphorothioate
  modified_base 18^19: mod_base = OTHER; note = Phosphorothioate
gccctcctgatgatctacc

SEQ ID NO: 496 - RNA, 19 nt, synthetic construct
  source 1..19: mol_type = other RNA
  ncRNA 1..19: ncRNA_class = siRNA
  modified_base order(1,3,5,7,9,11,13,15,17,19): mod_base = OTHER; note = 2-prime-O-Methyl RNA nucleotides
  modified_base order(2,4,6,8,10,12,14,16,18): mod_base = OTHER; note = 2-prime deoxy-2-prime-F RNA nucleotides
  modified_base 1^2: mod_base = OTHER; note = Phosphorothioate
  modified_base 2^3: mod_base = OTHER; note = Phosphorothioate
  modified_base 17^18: mod_base = OTHER; note = Phosphorothioate
  modified_base 18^19: mod_base = OTHER; note = Phosphorothioate
gggtagatcatcaggaggg

SEQ ID NO: 497 - RNA, 19 nt, synthetic construct
  source 1..19: mol_type = other RNA
  ncRNA 1..19: ncRNA_class = siRNA
  modified_base order(1..6,10..19): mod_base = OTHER; note = 2-prime-O-Methyl RNA nucleotides
  modified_base 7..9: mod_base = OTHER; note = 2-prime deoxy-2-prime-F RNA nucleotides
  modified_base 1^2: mod_base = OTHER; note = Phosphorothioate
  modified_base 2^3: mod_base = OTHER; note = Phosphorothioate
  modified_base 17^18: mod_base = OTHER; note = Phosphorothioate
  modified_base 18^19: mod_base = OTHER; note = Phosphorothioate
ccctcctgatgatctaccc

SEQ ID NO: 498 - RNA, 19 nt, synthetic construct
  source 1..19: mol_type = other RNA
  ncRNA 1..19: ncRNA_class = siRNA
  modified_base order(1,3,5,7,9,11,13,15,17,19): mod_base = OTHER; note = 2-prime-O-Methyl RNA nucleotides
  modified_base order(2,4,6,8,10,12,14,16,18): mod_base = OTHER; note = 2-prime deoxy-2-prime-F RNA nucleotides
  modified_base 1^2: mod_base = OTHER; note = Phosphorothioate
  modified_base 2^3: mod_base = OTHER; note = Phosphorothioate
  modified_base 17^18: mod_base = OTHER; note = Phosphorothioate
  modified_base 18^19: mod_base = OTHER; note = Phosphorothioate
tggcttgcacaggtgaaac

SEQ ID NO: 499 - RNA, 19 nt, synthetic construct
  source 1..19: mol_type = other RNA
  ncRNA 1..19: ncRNA_class = siRNA
  modified_base order(1..6,10..19): mod_base = OTHER; note = 2-prime-O-Methyl RNA nucleotides
  modified_base 7..9: mod_base = OTHER; note = 2-prime deoxy-2-prime-F RNA nucleotides
  modified_base 1^2: mod_base = OTHER; note = Phosphorothioate
  modified_base 2^3: mod_base = OTHER; note = Phosphorothioate
  modified_base 17^18: mod_base = OTHER; note = Phosphorothioate
  modified_base 18^19: mod_base = OTHER; note = Phosphorothioate
gtttcacctgtgcaagcca

SEQ ID NO: 500 - RNA, 19 nt, synthetic construct
  source 1..19: mol_type = other RNA
  ncRNA 1..19: ncRNA_class = siRNA
  modified_base order(1,3,5,7,9,11,13,15,17,19): mod_base = OTHER; note = 2-prime-O-Methyl RNA nucleotides
  modified_base order(2,4,6,8,10,12,14,16,18): mod_base = OTHER; note = 2-prime deoxy-2-prime-F RNA nucleotides
  modified_base 1^2: mod_base = OTHER; note = Phosphorothioate
  modified_base 2^3: mod_base = OTHER; note = Phosphorothioate
  modified_base 17^18: mod_base = OTHER; note = Phosphorothioate
  modified_base 18^19: mod_base = OTHER; note = Phosphorothioate
ctattcctcccacaaacca

SEQ ID NO: 501 - RNA, 19 nt, synthetic construct
  source 1..19: mol_type = other RNA
  ncRNA 1..19: ncRNA_class = siRNA
  modified_base order(1..6,10..19): mod_base = OTHER; note = 2-prime-O-Methyl RNA nucleotides
  modified_base 7..9: mod_base = OTHER; note = 2-prime deoxy-2-prime-F RNA nucleotides
  modified_base 1^2: mod_base = OTHER; note = Phosphorothioate
  modified_base 2^3: mod_base = OTHER; note = Phosphorothioate
  modified_base 17^18: mod_base = OTHER; note = Phosphorothioate
  modified_base 18^19: mod_base = OTHER; note = Phosphorothioate
tggtttgtgggaggaatag

SEQ ID NO: 502 - RNA, 19 nt, synthetic construct
  source 1..19: mol_type = other RNA
  ncRNA 1..19: ncRNA_class = siRNA
  modified_base order(1,3,5,7,9,11,13,15,17,19): mod_base = OTHER; note = 2-prime-O-Methyl RNA nucleotides
  modified_base order(2,4,6,8,10,12,14,16,18): mod_base = OTHER; note = 2-prime deoxy-2-prime-F RNA nucleotides
  modified_base 1^2: mod_base = OTHER; note = Phosphorothioate
  modified_base 2^3: mod_base = OTHER; note = Phosphorothioate
  modified_base 17^18: mod_base = OTHER; note = Phosphorothioate
  modified_base 18^19: mod_base = OTHER; note = Phosphorothioate
gagtagtcggagcggaagg

SEQ ID NO: 503 - RNA, 19 nt, synthetic construct
  source 1..19: mol_type = other RNA
  ncRNA 1..19: ncRNA_class = siRNA
  modified_base order(1..6,10..19): mod_base = OTHER; note = 2-prime-O-Methyl RNA nucleotides
  modified_base 7..9: mod_base = OTHER; note = 2-prime deoxy-2-prime-F RNA nucleotides
  modified_base 1^2: mod_base = OTHER; note = Phosphorothioate
  modified_base 2^3: mod_base = OTHER; note = Phosphorothioate
  modified_base 17^18: mod_base = OTHER; note = Phosphorothioate
  modified_base 18^19: mod_base = OTHER; note = Phosphorothioate
ccttccgctccgactactc

SEQ ID NO: 504 - RNA, 19 nt, synthetic construct
  source 1..19: mol_type = other RNA
  ncRNA 1..19: ncRNA_class = siRNA
  modified_base order(1,3,5,7,9,11,13,15,17,19): mod_base = OTHER; note = 2-prime-O-Methyl RNA nucleotides
  modified_base order(2,4,6,8,10,12,14,16,18): mod_base = OTHER; note = 2-prime deoxy-2-prime-F RNA nucleotides
  modified_base 1^2: mod_base = OTHER; note = Phosphorothioate
  modified_base 2^3: mod_base = OTHER; note = Phosphorothioate
  modified_base 17^18: mod_base = OTHER; note = Phosphorothioate
  modified_base 18^19: mod_base = OTHER; note = Phosphorothioate
gatccagggaatatagtta

SEQ ID NO: 505 - RNA, 19 nt, synthetic construct
  source 1..19: mol_type = other RNA
  ncRNA 1..19: ncRNA_class = siRNA
  modified_base order(1..6,10..19): mod_base = OTHER; note = 2-prime-O-Methyl RNA nucleotides
  modified_base 7..9: mod_base = OTHER; note = 2-prime deoxy-2-prime-F RNA nucleotides
  modified_base 1^2: mod_base = OTHER; note = Phosphorothioate
  modified_base 2^3: mod_base = OTHER; note = Phosphorothioate
  modified_base 17^18: mod_base = OTHER; note = Phosphorothioate
  modified_base 18^19: mod_base = OTHER; note = Phosphorothioate
taactatattccctggatc

SEQ ID NO: 506 - RNA, 19 nt, synthetic construct
  source 1..19: mol_type = other RNA
  ncRNA 1..19: ncRNA_class = siRNA
  modified_base order(1,3,5,7,9,11,13,15,17,19): mod_base = OTHER; note = 2-prime-O-Methyl RNA nucleotides
  modified_base order(2,4,6,8,10,12,14,16,18): mod_base = OTHER; note = 2-prime deoxy-2-prime-F RNA nucleotides
  modified_base 1^2: mod_base = OTHER; note = Phosphorothioate
  modified_base 2^3: mod_base = OTHER; note = Phosphorothioate
  modified_base 17^18: mod_base = OTHER; note = Phosphorothioate
  modified_base 18^19: mod_base = OTHER; note = Phosphorothioate
attagatttctagcaagaa

SEQ ID NO: 507 - RNA, 19 nt, synthetic construct
  source 1..19: mol_type = other RNA
  ncRNA 1..19: ncRNA_class = siRNA
  modified_base order(1..6,10..19): mod_base = OTHER; note = 2-prime-O-Methyl RNA nucleotides
  modified_base 7..9: mod_base = OTHER; note = 2-prime deoxy-2-prime-F RNA nucleotides
  modified_base 1^2: mod_base = OTHER; note = Phosphorothioate
  modified_base 2^3: mod_base = OTHER; note = Phosphorothioate
  modified_base 17^18: mod_base = OTHER; note = Phosphorothioate
  modified_base 18^19: mod_base = OTHER; note = Phosphorothioate
ttcttgctagaaatctaat

SEQ ID NO: 508 - RNA, 19 nt, synthetic construct
  source 1..19: mol_type = other RNA
  ncRNA 1..19: ncRNA_class = siRNA
  modified_base order(1,3,5,7,9,11,13,15,17,19): mod_base = OTHER; note = 2-prime-O-Methyl RNA nucleotides
  modified_base order(2,4,6,8,10,12,14,16,18): mod_base = OTHER; note = 2-prime deoxy-2-prime-F RNA nucleotides
  modified_base 1^2: mod_base = OTHER; note = Phosphorothioate
  modified_base 2^3: mod_base = OTHER; note = Phosphorothioate
  modified_base 17^18: mod_base = OTHER; note = Phosphorothioate
  modified_base 18^19: mod_base = OTHER; note = Phosphorothioate
gttaggacccagttgtcat

SEQ ID NO: 509 - RNA, 19 nt, synthetic construct
  source 1..19: mol_type = other RNA
  ncRNA 1..19: ncRNA_class = siRNA
  modified_base order(1..6,10..19): mod_base = OTHER; note = 2-prime-O-Methyl RNA nucleotides
  modified_base 7..9: mod_base = OTHER; note = 2-prime deoxy-2-prime-F RNA nucleotides
  modified_base 1^2: mod_base = OTHER; note = Phosphorothioate
  modified_base 2^3: mod_base = OTHER; note = Phosphorothioate
  modified_base 17^18: mod_base = OTHER; note = Phosphorothioate
  modified_base 18^19: mod_base = OTHER; note = Phosphorothioate
atgacaactgggtcctaac

SEQ ID NO: 510 - RNA, 19 nt, synthetic construct
  source 1..19: mol_type = other RNA
  ncRNA 1..19: ncRNA_class = siRNA
  modified_base order(1,3,5,7,9,11,13,15,17,19): mod_base = OTHER; note = 2-prime-O-Methyl RNA nucleotides
  modified_base order(2,4,6,8,10,12,14,16,18): mod_base = OTHER; note = 2-prime deoxy-2-prime-F RNA nucleotides
  modified_base 1^2: mod_base = OTHER; note = Phosphorothioate
  modified_base 2^3: mod_base = OTHER; note = Phosphorothioate
  modified_base 17^18: mod_base = OTHER; note = Phosphorothioate
  modified_base 18^19: mod_base = OTHER; note = Phosphorothioate
atccagggaatatagttaa

SEQ ID NO: 511 - RNA, 19 nt, synthetic construct
  source 1..19: mol_type = other RNA
  ncRNA 1..19: ncRNA_class = siRNA
  modified_base order(1..6,10..19): mod_base = OTHER; note = 2-prime-O-Methyl RNA nucleotides
  modified_base 7..9: mod_base = OTHER; note = 2-prime deoxy-2-prime-F RNA nucleotides
  modified_base 1^2: mod_base = OTHER; note = Phosphorothioate
  modified_base 2^3: mod_base = OTHER; note = Phosphorothioate
  modified_base 17^18: mod_base = OTHER; note = Phosphorothioate
  modified_base 18^19: mod_base = OTHER; note = Phosphorothioate
ttaactatattccctggat

SEQ ID NO: 512 - RNA, 19 nt, synthetic construct
  source 1..19: mol_type = other RNA
  ncRNA 1..19: ncRNA_class = siRNA
  modified_base order(1,3,5,7,9,11,13,15,17,19): mod_base = OTHER; note = 2-prime-O-Methyl RNA nucleotides
  modified_base order(2,4,6,8,10,12,14,16,18): mod_base = OTHER; note = 2-prime deoxy-2-prime-F RNA nucleotides
  modified_base 1^2: mod_base = OTHER; note = Phosphorothioate
  modified_base 2^3: mod_base = OTHER; note = Phosphorothioate
  modified_base 17^18: mod_base = OTHER; note = Phosphorothioate
  modified_base 18^19: mod_base = OTHER; note = Phosphorothioate
aagtccagaatgacactga

SEQ ID NO: 513 - RNA, 19 nt, synthetic construct
  source 1..19: mol_type = other RNA
  ncRNA 1..19: ncRNA_class = siRNA
  modified_base order(1..6,10..19): mod_base = OTHER; note = 2-prime-O-Methyl RNA nucleotides
  modified_base 7..9: mod_base = OTHER; note = 2-prime deoxy-2-prime-F RNA nucleotides
  modified_base 1^2: mod_base = OTHER; note = Phosphorothioate
  modified_base 2^3: mod_base = OTHER; note = Phosphorothioate
  modified_base 17^18: mod_base = OTHER; note = Phosphorothioate
  modified_base 18^19: mod_base = OTHER; note = Phosphorothioate
tcagtgtcattctggactt

SEQ ID NO: 514 - RNA, 19 nt, synthetic construct
  source 1..19: mol_type = other RNA
  ncRNA 1..19: ncRNA_class = siRNA
  modified_base order(1,3,5,7,9,11,13,15,17,19): mod_base = OTHER; note = 2-prime-O-Methyl RNA nucleotides
  modified_base order(2,4,6,8,10,12,14,16,18): mod_base = OTHER; note = 2-prime deoxy-2-prime-F RNA nucleotides
  modified_base 1^2: mod_base = OTHER; note = Phosphorothioate
  modified_base 2^3: mod_base = OTHER; note = Phosphorothioate
  modified_base 17^18: mod_base = OTHER; note = Phosphorothioate
  modified_base 18^19: mod_base = OTHER; note = Phosphorothioate
acatttttgatggtcaaca

SEQ ID NO: 515 - RNA, 19 nt, synthetic construct
  source 1..19: mol_type = other RNA
  ncRNA 1..19: ncRNA_class = siRNA
  modified_base order(1..6,10..19): mod_base = OTHER; note = 2-prime-O-Methyl RNA nucleotides
  modified_base 7..9: mod_base = OTHER; note = 2-prime deoxy-2-prime-F RNA nucleotides
  modified_base 1^2: mod_base = OTHER; note = Phosphorothioate
  modified_base 2^3: mod_base = OTHER; note = Phosphorothioate
  modified_base 17^18: mod_base = OTHER; note = Phosphorothioate
  modified_base 18^19: mod_base = OTHER; note = Phosphorothioate
tgttgaccatcaaaaatgt

SEQ ID NO: 516 - RNA, 19 nt, synthetic construct
  source 1..19: mol_type = other RNA
  ncRNA 1..19: ncRNA_class = siRNA
  modified_base order(1,3,5,7,9,11,13,15,17,19): mod_base = OTHER; note = 2-prime-O-Methyl RNA nucleotides
  modified_base order(2,4,6,8,10,12,14,16,18): mod_base = OTHER; note = 2-prime deoxy-2-prime-F RNA nucleotides
  modified_base 1^2: mod_base = OTHER; note = Phosphorothioate
  modified_base 2^3: mod_base = OTHER; note = Phosphorothioate
  modified_base 17^18: mod_base = OTHER; note = Phosphorothioate
  modified_base 18^19: mod_base = OTHER; note = Phosphorothioate
gagctcgtccagaatccat

SEQ ID NO: 517 - RNA, 19 nt, synthetic construct
  source 1..19: mol_type = other RNA
  ncRNA 1..19: ncRNA_class = siRNA
  modified_base order(1..6,10..19): mod_base = OTHER; note = 2-prime-O-Methyl RNA nucleotides
  modified_base 7..9: mod_base = OTHER; note = 2-prime deoxy-2-prime-F RNA nucleotides
  modified_base 1^2: mod_base = OTHER; note = Phosphorothioate
  modified_base 2^3: mod_base = OTHER; note = Phosphorothioate
  modified_base 17^18: mod_base = OTHER; note = Phosphorothioate
  modified_base 18^19: mod_base = OTHER; note = Phosphorothioate
atggattctggacgagctc

SEQ ID NO: 518 - RNA, 19 nt, synthetic construct
  source 1..19: mol_type = other RNA
  ncRNA 1..19: ncRNA_class = siRNA
  modified_base order(1,3,5,7,9,11,13,15,17,19): mod_base = OTHER; note = 2-prime-O-Methyl RNA nucleotides
  modified_base order(2,4,6,8,10,12,14,16,18): mod_base = OTHER; note = 2-prime deoxy-2-prime-F RNA nucleotides
  modified_base 1^2: mod_base = OTHER; note = Phosphorothioate
  modified_base 2^3: mod_base = OTHER; note = Phosphorothioate
  modified_base 17^18: mod_base = OTHER; note = Phosphorothioate
  modified_base 18^19: mod_base = OTHER; note = Phosphorothioate
gtgtagaaggtctcttcac

SEQ ID NO: 519 - RNA, 19 nt, synthetic construct
  source 1..19: mol_type = other RNA
  ncRNA 1..19: ncRNA_class = siRNA
  modified_base order(1..6,10..19): mod_base = OTHER; note = 2-prime-O-Methyl RNA nucleotides
  modified_base 7..9: mod_base = OTHER; note = 2-prime deoxy-2-prime-F RNA nucleotides
  modified_base 1^2: mod_base = OTHER; note = Phosphorothioate
  modified_base 2^3: mod_base = OTHER; note = Phosphorothioate
  modified_base 17^18: mod_base = OTHER; note = Phosphorothioate
  modified_base 18^19: mod_base = OTHER; note = Phosphorothioate
gtgaagagaccttctacac

SEQ ID NO: 520 - RNA, 19 nt, synthetic construct
  source 1..19: mol_type = other RNA
  ncRNA 1..19: ncRNA_class = siRNA
  modified_base order(1,3,5,7,9,11,13,15,17,19): mod_base = OTHER; note = 2-prime-O-Methyl RNA nucleotides
  modified_base order(2,4,6,8,10,12,14,16,18): mod_base = OTHER; note = 2-prime deoxy-2-prime-F RNA nucleotides
  modified_base 1^2: mod_base = OTHER; note = Phosphorothioate
  modified_base 2^3: mod_base = OTHER; note = Phosphorothioate
  modified_base 17^18: mod_base = OTHER; note = Phosphorothioate
  modified_base 18^19: mod_base = OTHER; note = Phosphorothioate
cactattcctcccacaaac

SEQ ID NO: 521 - RNA, 19 nt, synthetic construct
  source 1..19: mol_type = other RNA
  ncRNA 1..19: ncRNA_class = siRNA
  modified_base order(1..6,10..19): mod_base = OTHER; note = 2-prime-O-Methyl RNA nucleotides
  modified_base 7..9: mod_base = OTHER; note = 2-prime deoxy-2-prime-F RNA nucleotides
  modified_base 1^2: mod_base = OTHER; note = Phosphorothioate
  modified_base 2^3: mod_base = OTHER; note = Phosphorothioate
  modified_base 17^18: mod_base = OTHER; note = Phosphorothioate
  modified_base 18^19: mod_base = OTHER; note = Phosphorothioate
gtttgtgggaggaatagtg

SEQ ID NO: 522 - RNA, 19 nt, synthetic construct
  source 1..19: mol_type = other RNA
  ncRNA 1..19: ncRNA_class = siRNA
  modified_base order(1,3,5,7,9,11,13,15,17,19): mod_base = OTHER; note = 2-prime-O-Methyl RNA nucleotides
  modified_base order(2,4,6,8,10,12,14,16,18): mod_base = OTHER; note = 2-prime deoxy-2-prime-F RNA nucleotides
  modified_base 1^2: mod_base = OTHER; note = Phosphorothioate
  modified_base 2^3: mod_base = OTHER; note = Phosphorothioate
  modified_base 17^18: mod_base = OTHER; note = Phosphorothioate
  modified_base 18^19: mod_base = OTHER; note = Phosphorothioate
acactattcctcccacaaa

SEQ ID NO: 523 - RNA, 19 nt, synthetic construct
  source 1..19: mol_type = other RNA
  ncRNA 1..19: ncRNA_class = siRNA
  modified_base order(1..6,10..19): mod_base = OTHER; note = 2-prime-O-Methyl RNA nucleotides
  modified_base 7..9: mod_base = OTHER; note = 2-prime deoxy-2-prime-F RNA nucleotides
  modified_base 1^2: mod_base = OTHER; note = Phosphorothioate
  modified_base 2^3: mod_base = OTHER; note = Phosphorothioate
  modified_base 17^18: mod_base = OTHER; note = Phosphorothioate
  modified_base 18^19: mod_base = OTHER; note = Phosphorothioate
tttgtgggaggaatagtgt

SEQ ID NO: 524 - RNA, 19 nt, synthetic construct
  source 1..19: mol_type = other RNA
  ncRNA 1..19: ncRNA_class = siRNA
  modified_base order(1,3,5,7,9,11,13,15,17,19): mod_base = OTHER; note = 2-prime-O-Methyl RNA nucleotides
  modified_base order(2,4,6,8,10,12,14,16,18): mod_base = OTHER; note = 2-prime deoxy-2-prime-F RNA nucleotides
  modified_base 1^2: mod_base = OTHER; note = Phosphorothioate
  modified_base 2^3: mod_base = OTHER; note = Phosphorothioate
  modified_base 17^18: mod_base = OTHER; note = Phosphorothioate
  modified_base 18^19: mod_base = OTHER; note = Phosphorothioate
tgtactgaatcacagcttt

SEQ ID NO: 525 - RNA, 19 nt, synthetic construct
  source 1..19: mol_type = other RNA
  ncRNA 1..19: ncRNA_class = siRNA
  modified_base order(1..6,10..19): mod_base = OTHER; note = 2-prime-O-Methyl RNA nucleotides
  modified_base 7..9: mod_base = OTHER; note = 2-prime deoxy-2-prime-F RNA nucleotides
  modified_base 1^2: mod_base = OTHER; note = Phosphorothioate
  modified_base 2^3: mod_base = OTHER; note = Phosphorothioate
  modified_base 17^18: mod_base = OTHER; note = Phosphorothioate
  modified_base 18^19: mod_base = OTHER; note = Phosphorothioate
aaagctgtgattcagtaca

SEQ ID NO: 526 - RNA, 19 nt, synthetic construct
  source 1..19: mol_type = other RNA
  ncRNA 1..19: ncRNA_class = siRNA
  modified_base order(1,3,5,7,9,11,13,15,17,19): mod_base = OTHER; note = 2-prime-O-Methyl RNA nucleotides
  modified_base order(2,4,6,8,10,12,14,16,18): mod_base = OTHER; note = 2-prime deoxy-2-prime-F RNA nucleotides
  modified_base 1^2: mod_base = OTHER; note = Phosphorothioate
  modified_base 2^3: mod_base = OTHER; note = Phosphorothioate
  modified_base 17^18: mod_base = OTHER; note = Phosphorothioate
  modified_base 18^19: mod_base = OTHER; note = Phosphorothioate
aaccccaggacactattcc

SEQ ID NO: 527 - RNA, 19 nt, synthetic construct
  source 1..19: mol_type = other RNA
  ncRNA 1..19: ncRNA_class = siRNA
  modified_base order(1..6,10..19): mod_base = OTHER; note = 2-prime-O-Methyl RNA nucleotides
  modified_base 7..9: mod_base = OTHER; note = 2-prime deoxy-2-prime-F RNA nucleotides
  modified_base 1^2: mod_base = OTHER; note = Phosphorothioate
  modified_base 2^3: mod_base = OTHER; note = Phosphorothioate
  modified_base 17^18: mod_base = OTHER; note = Phosphorothioate
  modified_base 18^19: mod_base = OTHER; note = Phosphorothioate
ggaatagtgtcctggggtt

SEQ ID NO: 528 - RNA, 19 nt, synthetic construct
  source 1..19: mol_type = other RNA
  ncRNA 1..19: ncRNA_class = siRNA
  modified_base order(1,3,5,7,9,11,13,15,17,19): mod_base = OTHER; note = 2-prime-O-Methyl RNA nucleotides
  modified_base order(2,4,6,8,10,12,14,16,18): mod_base = OTHER; note = 2-prime deoxy-2-prime-F RNA nucleotides
  modified_base 1^2: mod_base = OTHER; note = Phosphorothioate
  modified_base 2^3: mod_base = OTHER; note = Phosphorothioate
  modified_base 17^18: mod_base = OTHER; note = Phosphorothioate
  modified_base 18^19: mod_base = OTHER; note = Phosphorothioate
ctttggagctcgtccagaa

SEQ ID NO: 529 - RNA, 19 nt, synthetic construct
  source 1..19: mol_type = other RNA
  ncRNA 1..19: ncRNA_class = siRNA
  modified_base order(1..6,10..19): mod_base = OTHER; note = 2-prime-O-Methyl RNA nucleotides
  modified_base 7..9: mod_base = OTHER; note = 2-prime deoxy-2-prime-F RNA nucleotides
  modified_base 1^2: mod_base = OTHER; note = Phosphorothioate
  modified_base 2^3: mod_base = OTHER; note = Phosphorothioate
  modified_base 17^18: mod_base = OTHER; note = Phosphorothioate
  modified_base 18^19: mod_base = OTHER; note = Phosphorothioate
ttctggacgagctccaaag

SEQ ID NO: 530 - RNA, 19 nt, synthetic construct
  source 1..19: mol_type = other RNA
  ncRNA 1..19: ncRNA_class = siRNA
  modified_base order(1,3,5,7,9,11,13,15,17,19): mod_base = OTHER; note = 2-prime-O-Methyl RNA nucleotides
  modified_base order(2,4,6,8,10,12,14,16,18): mod_base = OTHER; note = 2-prime deoxy-2-prime-F RNA nucleotides
  modified_base 1^2: mod_base = OTHER; note = Phosphorothioate
  modified_base 2^3: mod_base = OTHER; note = Phosphorothioate
  modified_base 17^18: mod_base = OTHER; note = Phosphorothioate
  modified_base 18^19: mod_base = OTHER; note = Phosphorothioate
tagtggatcttccagcctg

SEQ ID NO: 531 - RNA, 19 nt, synthetic construct
  source 1..19: mol_type = other RNA
  ncRNA 1..19: ncRNA_class = siRNA
  modified_base order(1..6,10..19): mod_base = OTHER; note = 2-prime-O-Methyl RNA nucleotides
  modified_base 7..9: mod_base = OTHER; note = 2-prime deoxy-2-prime-F RNA nucleotides
  modified_base 1^2: mod_base = OTHER; note = Phosphorothioate
  modified_base 2^3: mod_base = OTHER; note = Phosphorothioate
  modified_base 17^18: mod_base = OTHER; note = Phosphorothioate
  modified_base 18^19: mod_base = OTHER; note = Phosphorothioate
caggctggaagatccacta

SEQ ID NO: 532 - RNA, 19 nt, synthetic construct
  source 1..19: mol_type = other RNA
  ncRNA 1..19: ncRNA_class = siRNA
  modified_base order(1,3,5,7,9,11,13,15,17,19): mod_base = OTHER; note = 2-prime-O-Methyl RNA nucleotides
  modified_base order(2,4,6,8,10,12,14,16,18): mod_base = OTHER; note = 2-prime deoxy-2-prime-F RNA nucleotides
  modified_base 1^2: mod_base = OTHER; note = Phosphorothioate
  modified_base 2^3: mod_base = OTHER; note = Phosphorothioate
  modified_base 17^18: mod_base = OTHER; note = Phosphorothioate
  modified_base 18^19: mod_base = OTHER; note = Phosphorothioate
gacactattcctcccacaa

SEQ ID NO: 533 - RNA, 19 nt, synthetic construct
  source 1..19: mol_type = other RNA
  ncRNA 1..19: ncRNA_class = siRNA
  modified_base order(1..6,10..19): mod_base = OTHER; note = 2-prime-O-Methyl RNA nucleotides
  modified_base 7..9: mod_base = OTHER; note = 2-prime deoxy-2-prime-F RNA nucleotides
  modified_base 1^2: mod_base = OTHER; note = Phosphorothioate
  modified_base 2^3: mod_base = OTHER; note = Phosphorothioate
  modified_base 17^18: mod_base = OTHER; note = Phosphorothioate
  modified_base 18^19: mod_base = OTHER; note = Phosphorothioate
ttgtgggaggaatagtgtc

SEQ ID NO: 534 - RNA, 19 nt, synthetic construct
  source 1..19: mol_type = other RNA
  ncRNA 1..19: ncRNA_class = siRNA
  modified_base order(1,3,5,7,9,11,13,15,17,19): mod_base = OTHER; note = 2-prime-O-Methyl RNA nucleotides
  modified_base order(2,4,6,8,10,12,14,16,18): mod_base = OTHER; note = 2-prime deoxy-2-prime-F RNA nucleotides
  modified_base 1^2: mod_base = OTHER; note = Phosphorothioate
  modified_base 2^3: mod_base = OTHER; note = Phosphorothioate
  modified_base 17^18: mod_base = OTHER; note = Phosphorothioate
  modified_base 18^19: mod_base = OTHER; note = Phosphorothioate
acattagatttctagcaag

SEQ ID NO: 535 - RNA, 19 nt, synthetic construct
  source 1..19: mol_type = other RNA
  ncRNA 1..19: ncRNA_class = siRNA
  modified_base order(1..6,10..19): mod_base = OTHER; note = 2-prime-O-Methyl RNA nucleotides
  modified_base 7..9: mod_base = OTHER; note = 2-prime deoxy-2-prime-F RNA nucleotides
  modified_base 1^2: mod_base = OTHER; note = Phosphorothioate
  modified_base 2^3: mod_base = OTHER; note = Phosphorothioate
  modified_base 17^18: mod_base = OTHER; note = Phosphorothioate
  modified_base 18^19: mod_base = OTHER; note = Phosphorothioate
cttgctagaaatctaatgt

SEQ ID NO: 536 - RNA, 19 nt, synthetic construct
  source 1..19: mol_type = other RNA
  ncRNA 1..19: ncRNA_class = siRNA
  modified_base order(1,3,5,7,9,11,13,15,17,19): mod_base = OTHER; note = 2-prime-O-Methyl RNA nucleotides
  modified_base order(2,4,6,8,10,12,14,16,18): mod_base = OTHER; note = 2-prime deoxy-2-prime-F RNA nucleotides
  modified_base 1^2: mod_base = OTHER; note = Phosphorothioate
  modified_base 2^3: mod_base = OTHER; note = Phosphorothioate
  modified_base 17^18: mod_base = OTHER; note = Phosphorothioate
  modified_base 18^19: mod_base = OTHER; note = Phosphorothioate
tctcgttggagtagtcgga

SEQ ID NO: 537 - RNA, 19 nt, synthetic construct
  source 1..19: mol_type = other RNA
  ncRNA 1..19: ncRNA_class = siRNA
  modified_base order(1..6,10..19): mod_base = OTHER; note = 2-prime-O-Methyl RNA nucleotides
  modified_base 7..9: mod_base = OTHER; note = 2-prime deoxy-2-prime-F RNA nucleotides
  modified_base 1^2: mod_base = OTHER; note = Phosphorothioate
  modified_base 2^3: mod_base = OTHER; note = Phosphorothioate
  modified_base 17^18: mod_base = OTHER; note = Phosphorothioate
  modified_base 18^19: mod_base = OTHER; note = Phosphorothioate
tccgactactccaacgaga

SEQ ID NO: 538 - RNA, 19 nt, synthetic construct
  source 1..19: mol_type = other RNA
  ncRNA 1..19: ncRNA_class = siRNA
  modified_base order(1,3,5,7,9,11,13,15,17,19): mod_base = OTHER; note = 2-prime-O-Methyl RNA nucleotides
  modified_base order(2,4,6,8,10,12,14,16,18): mod_base = OTHER; note = 2-prime deoxy-2-prime-F RNA nucleotides
  modified_base 1^2: mod_base = OTHER; note = Phosphorothioate
  modified_base 2^3: mod_base = OTHER; note = Phosphorothioate
  modified_base 17^18: mod_base = OTHER; note = Phosphorothioate
  modified_base 18^19: mod_base = OTHER; note = Phosphorothioate
cacagctgtactgaatcac

SEQ ID NO: 539 - RNA, 19 nt, synthetic construct
  source 1..19: mol_type = other RNA
  ncRNA 1..19: ncRNA_class = siRNA
  modified_base order(1..6,10..19): mod_base = OTHER; note = 2-prime-O-Methyl RNA nucleotides
  modified_base 7..9: mod_base = OTHER; note = 2-prime deoxy-2-prime-F RNA nucleotides
  modified_base 1^2: mod_base = OTHER; note = Phosphorothioate
  modified_base 2^3: mod_base = OTHER; note = Phosphorothioate
  modified_base 17^18: mod_base = OTHER; note = Phosphorothioate
  modified_base 18^19: mod_base = OTHER; note = Phosphorothioate
gtgattcagtacagctgtg

SEQ ID NO: 540 - RNA, 19 nt, synthetic construct
  source 1..19: mol_type = other RNA
  ncRNA 1..19: ncRNA_class = siRNA
  modified_base order(1,3,5,7,9,11,13,15,17,19): mod_base = OTHER; note = 2-prime-O-Methyl RNA nucleotides
  modified_base order(2,4,6,8,10,12,14,16,18): mod_base = OTHER; note = 2-prime deoxy-2-prime-F RNA nucleotides
  modified_base 1^2: mod_base = OTHER; note = Phosphorothioate
  modified_base 2^3: mod_base = OTHER; note = Phosphorothioate
  modified_base 17^18: mod_base = OTHER; note = Phosphorothioate
  modified_base 18^19: mod_base = OTHER; note = Phosphorothioate
tgtctgtttgaatcttgag

SEQ ID NO: 541 - RNA, 19 nt, synthetic construct
  source 1..19: mol_type = other RNA
  ncRNA 1..19: ncRNA_class = siRNA
  modified_base order(1..6,10..19): mod_base = OTHER; note = 2-prime-O-Methyl RNA nucleotides
  modified_base 7..9: mod_base = OTHER; note = 2-prime deoxy-2-prime-F RNA nucleotides
  modified_base 1^2: mod_base = OTHER; note = Phosphorothioate
  modified_base 2^3: mod_base = OTHER; note = Phosphorothioate
  modified_base 17^18: mod_base = OTHER; note = Phosphorothioate
  modified_base 18^19: mod_base = OTHER; note = Phosphorothioate
ctcaagattcaaacagaca

SEQ ID NO: 542 - RNA, 19 nt, synthetic construct
  source 1..19: mol_type = other RNA
  ncRNA 1..19: ncRNA_class = siRNA
  modified_base order(1,3,5,7,9,11,13,15,17,19): mod_base = OTHER; note = 2-prime-O-Methyl RNA nucleotides
  modified_base order(2,4,6,8,10,12,14,16,18): mod_base = OTHER; note = 2-prime deoxy-2-prime-F RNA nucleotides
  modified_base 1^2: mod_base = OTHER; note = Phosphorothioate
  modified_base 2^3: mod_base = OTHER; note = Phosphorothioate
  modified_base 17^18: mod_base = OTHER; note = Phosphorothioate
  modified_base 18^19: mod_base = OTHER; note = Phosphorothioate
actgaatcacagctttgta

SEQ ID NO: 543 - RNA, 19 nt, synthetic construct
  source 1..19: mol_type = other RNA
  ncRNA 1..19: ncRNA_class = siRNA
  modified_base order(1..6,10..19): mod_base = OTHER; note = 2-prime-O-Methyl RNA nucleotides
  modified_base 7..9: mod_base = OTHER; note = 2-prime deoxy-2-prime-F RNA nucleotides
  modified_base 1^2: mod_base = OTHER; note = Phosphorothioate
  modified_base 2^3: mod_base = OTHER; note = Phosphorothioate
  modified_base 17^18: mod_base = OTHER; note = Phosphorothioate
  modified_base 18^19: mod_base = OTHER; note = Phosphorothioate
tacaaagctgtgattcagt

SEQ ID NO: 544 - RNA, 19 nt, synthetic construct
  source 1..19: mol_type = other RNA
  ncRNA 1..19: ncRNA_class = siRNA
  modified_base order(1,3,5,7,9,11,13,15,17,19): mod_base = OTHER; note = 2-prime-O-Methyl RNA nucleotides
  modified_base order(2,4,6,8,10,12,14,16,18): mod_base = OTHER; note = 2-prime deoxy-2-prime-F RNA nucleotides
  modified_base 1^2: mod_base = OTHER; note = Phosphorothioate
  modified_base 2^3: mod_base = OTHER; note = Phosphorothioate
  modified_base 17^18: mod_base = OTHER; note = Phosphorothioate
  modified_base 18^19: mod_base = OTHER; note = Phosphorothioate
gtccagaatccatcagcct

SEQ ID NO: 545 - RNA, 19 nt, synthetic construct
  source 1..19: mol_type = other RNA
  ncRNA 1..19: ncRNA_class = siRNA
  modified_base order(1..6,10..19): mod_base = OTHER; note = 2-prime-O-Methyl RNA nucleotides
  modified_base 7..9: mod_base = OTHER; note = 2-prime deoxy-2-prime-F RNA nucleotides
  modified_base 1^2: mod_base = OTHER; note = Phosphorothioate
  modified_base 2^3: mod_base = OTHER; note = Phosphorothioate
  modified_base 17^18: mod_base = OTHER; note = Phosphorothioate
  modified_base 18^19: mod_base = OTHER; note = Phosphorothioate
aggctgatggattctggac

SEQ ID NO: 546 - RNA, 19 nt, synthetic construct
  source 1..19: mol_type = other RNA
  ncRNA 1..19: ncRNA_class = siRNA
  modified_base order(1,3,5,7,9,11,13,15,17,19): mod_base = OTHER; note = 2-prime-O-Methyl RNA nucleotides
  modified_base order(2,4,6,8,10,12,14,16,18): mod_base = OTHER; note = 2-prime deoxy-2-prime-F RNA nucleotides
  modified_base 1^2: mod_base = OTHER; note = Phosphorothioate
  modified_base 2^3: mod_base = OTHER; note = Phosphorothioate
  modified_base 17^18: mod_base = OTHER; note = Phosphorothioate
  modified_base 18^19: mod_base = OTHER; note = Phosphorothioate
acttgccaaggaaaatcac

SEQ ID NO: 547 - RNA, 19 nt, synthetic construct
  source 1..19: mol_type = other RNA
  ncRNA 1..19: ncRNA_class = siRNA
  modified_base order(1..6,10..19): mod_base = OTHER; note = 2-prime-O-Methyl RNA nucleotides
  modified_base 7..9: mod_base = OTHER; note = 2-prime deoxy-2-prime-F RNA nucleotides
  modified_base 1^2: mod_base = OTHER; note = Phosphorothioate
  modified_base 2^3: mod_base = OTHER; note = Phosphorothioate
  modified_base 17^18: mod_base = OTHER; note = Phosphorothioate
  modified_base 18^19: mod_base = OTHER; note = Phosphorothioate
gtgattttccttggcaagt

SEQ ID NO: 548 - RNA, 19 nt, synthetic construct
  source 1..19: mol_type = other RNA
  ncRNA 1..19: ncRNA_class = siRNA
  modified_base order(1,3,5,7,9,11,13,15,17,19): mod_base = OTHER; note = 2-prime-O-Methyl RNA nucleotides
  modified_base order(2,4,6,8,10,12,14,16,18): mod_base = OTHER; note = 2-prime deoxy-2-prime-F RNA nucleotides
  modified_base 1^2: mod_base = OTHER; note = Phosphorothioate
  modified_base 2^3: mod_base = OTHER; note = Phosphorothioate
  modified_base 17^18: mod_base = OTHER; note = Phosphorothioate
  modified_base 18^19: mod_base = OTHER; note = Phosphorothioate
tcacagctgtactgaatca

SEQ ID NO: 549 - RNA, 19 nt, synthetic construct
  source 1..19: mol_type = other RNA
  ncRNA 1..19: ncRNA_class = siRNA
  modified_base order(1..6,10..19): mod_base = OTHER; note = 2-prime-O-Methyl RNA nucleotides
  modified_base 7..9: mod_base = OTHER; note = 2-prime deoxy-2-prime-F RNA nucleotides
  modified_base 1^2: mod_base = OTHER; note = Phosphorothioate
  modified_base 2^3: mod_base = OTHER; note = Phosphorothioate
  modified_base 17^18: mod_base = OTHER; note = Phosphorothioate
  modified_base 18^19: mod_base = OTHER; note = Phosphorothioate
tgattcagtacagctgtga

SEQ ID NO: 550 - RNA, 19 nt, synthetic construct
  source 1..19: mol_type = other RNA
  ncRNA 1..19: ncRNA_class = siRNA
  modified_base order(1,3,5,7,9,11,13,15,17,19): mod_base = OTHER; note = 2-prime-O-Methyl RNA nucleotides
  modified_base order(2,4,6,8,10,12,14,16,18): mod_base = OTHER; note = 2-prime deoxy-2-prime-F RNA nucleotides
  modified_base 1^2: mod_base = OTHER; note = Phosphorothioate
  modified_base 2^3: mod_base = OTHER; note = Phosphorothioate
  modified_base 17^18: mod_base = OTHER; note = Phosphorothioate
  modified_base 18^19: mod_base = OTHER; note = Phosphorothioate
agctcgtccagaatccatc

SEQ ID NO: 551 - RNA, 19 nt, synthetic construct
  source 1..19: mol_type = other RNA
  ncRNA 1..19: ncRNA_class = siRNA
  modified_base order(1..6,10..19): mod_base = OTHER; note = 2-prime-O-Methyl RNA nucleotides
  modified_base 7..9: mod_base = OTHER; note = 2-prime deoxy-2-prime-F RNA nucleotides
  modified_base 1^2: mod_base = OTHER; note = Phosphorothioate
  modified_base 2^3: mod_base = OTHER; note = Phosphorothioate
  modified_base 17^18: mod_base = OTHER; note = Phosphorothioate
  modified_base 18^19: mod_base = OTHER; note = Phosphorothioate
gatggattctggacgagct

SEQ ID NO: 552 - RNA, 19 nt, synthetic construct
  source 1..19: mol_type = other RNA
  ncRNA 1..19: ncRNA_class = siRNA
  modified_base order(1,3,5,7,9,11,13,15,17,19): mod_base = OTHER; note = 2-prime-O-Methyl RNA nucleotides
  modified_base order(2,4,6,8,10,12,14,16,18): mod_base = OTHER; note = 2-prime deoxy-2-prime-F RNA nucleotides
  modified_base 1^2: mod_base = OTHER; note = Phosphorothioate
  modified_base 2^3: mod_base = OTHER; note = Phosphorothioate
  modified_base 17^18: mod_base = OTHER; note = Phosphorothioate
  modified_base 18^19: mod_base = OTHER; note = Phosphorothioate
atcttccagcctgtgtggt

SEQ ID NO: 553 - RNA, 19 nt, synthetic construct
  source 1..19: mol_type = other RNA
  ncRNA 1..19: ncRNA_class = siRNA
  modified_base order(1..6,10..19): mod_base = OTHER; note = 2-prime-O-Methyl RNA nucleotides
  modified_base 7..9: mod_base = OTHER; note = 2-prime deoxy-2-prime-F RNA nucleotides
  modified_base 1^2: mod_base = OTHER; note = Phosphorothioate
  modified_base 2^3: mod_base = OTHER; note = Phosphorothioate
  modified_base 17^18: mod_base = OTHER; note = Phosphorothioate
  modified_base 18^19: mod_base = OTHER; note = Phosphorothioate
accacacaggctggaagat

SEQ ID NO: 554 - RNA, 19 nt, synthetic construct
  source 1..19: mol_type = other RNA
  ncRNA 1..19: ncRNA_class = siRNA
  modified_base order(1,3,5,7,9,11,13,15,17,19): mod_base = OTHER; note = 2-prime-O-Methyl RNA nucleotides
  modified_base order(2,4,6,8,10,12,14,16,18): mod_base = OTHER; note = 2-prime deoxy-2-prime-F RNA nucleotides
  modified_base 1^2: mod_base = OTHER; note = Phosphorothioate
  modified_base 2^3: mod_base = OTHER; note = Phosphorothioate
  modified_base 17^18: mod_base = OTHER; note = Phosphorothioate
  modified_base 18^19: mod_base = OTHER; note = Phosphorothioate
tggagtagtcggagcggaa

SEQ ID NO: 555 - RNA, 19 nt, synthetic construct
  source 1..19: mol_type = other RNA
  ncRNA 1..19: ncRNA_class = siRNA
  modified_base order(1..6,10..19): mod_base = OTHER; note = 2-prime-O-Methyl RNA nucleotides
  modified_base 7..9: mod_base = OTHER; note = 2-prime deoxy-2-prime-F RNA nucleotides
  modified_base 1^2: mod_base = OTHER; note = Phosphorothioate
  modified_base 2^3: mod_base = OTHER; note = Phosphorothioate
  modified_base 17^18: mod_base = OTHER; note = Phosphorothioate
  modified_base 18^19: mod_base = OTHER; note = Phosphorothioate
ttccgctccgactactcca

SEQ ID NO: 556 - RNA, 19 nt, synthetic construct
  source 1..19: mol_type = other RNA
  ncRNA 1..19: ncRNA_class = siRNA
  modified_base order(1,3,5,7,9,11,13,15,17,19): mod_base = OTHER; note = 2-prime-O-Methyl RNA nucleotides
  modified_base order(2,4,6,8,10,12,14,16,18): mod_base = OTHER; note = 2-prime deoxy-2-prime-F RNA nucleotides
  modified_base 1^2: mod_base = OTHER; note = Phosphorothioate
  modified_base 2^3: mod_base = OTHER; note = Phosphorothioate
  modified_base 17^18: mod_base = OTHER; note = Phosphorothioate
  modified_base 18^19: mod_base = OTHER; note = Phosphorothioate
ctcgatccagggaatatag

SEQ ID NO: 557 - RNA, 19 nt, synthetic construct
  source 1..19: mol_type = other RNA
  ncRNA 1..19: ncRNA_class = siRNA
  modified_base order(1..6,10..19): mod_base = OTHER; note = 2-prime-O-Methyl RNA nucleotides
  modified_base 7..9: mod_base = OTHER; note = 2-prime deoxy-2-prime-F RNA nucleotides
  modified_base 1^2: mod_base = OTHER; note = Phosphorothioate
  modified_base 2^3: mod_base = OTHER; note = Phosphorothioate
  modified_base 17^18: mod_base = OTHER; note = Phosphorothioate
  modified_base 18^19: mod_base = OTHER; note = Phosphorothioate
ctatattccctggatcgag

SEQ ID NO: 558 - RNA, 19 nt, synthetic construct
  source 1..19: mol_type = other RNA
  ncRNA 1..19: ncRNA_class = siRNA
  modified_base order(1,3,5,7,9,11,13,15,17,19): mod_base = OTHER; note = 2-prime-O-Methyl RNA nucleotides
  modified_base order(2,4,6,8,10,12,14,16,18): mod_base = OTHER; note = 2-prime deoxy-2-prime-F RNA nucleotides
  modified_base 1^2: mod_base = OTHER; note = Phosphorothioate
  modified_base 2^3: mod_base = OTHER; note = Phosphorothioate
  modified_base 17^18: mod_base = OTHER; note = Phosphorothioate
  modified_base 18^19: mod_base = OTHER; note = Phosphorothioate
tactgaatcacagctttgt

SEQ ID NO: 559 - RNA, 19 nt, synthetic construct
  source 1..19: mol_type = other RNA
  ncRNA 1..19: ncRNA_class = siRNA
  modified_base order(1..6,10..19): mod_base = OTHER; note = 2-prime-O-Methyl RNA nucleotides
  modified_base 7..9: mod_base = OTHER; note = 2-prime deoxy-2-prime-F RNA nucleotides
  modified_base 1^2: mod_base = OTHER; note = Phosphorothioate
  modified_base 2^3: mod_base = OTHER; note = Phosphorothioate
  modified_base 17^18: mod_base = OTHER; note = Phosphorothioate
  modified_base 18^19: mod_base = OTHER; note = Phosphorothioate
acaaagctgtgattcagta

SEQ ID NO: 560 - RNA, 19 nt, synthetic construct
  source 1..19: mol_type = other RNA
  ncRNA 1..19: ncRNA_class = siRNA
  modified_base order(1,3,5,7,9,11,13,15,17,19): mod_base = OTHER; note = 2-prime-O-Methyl RNA nucleotides
  modified_base order(2,4,6,8,10,12,14,16,18): mod_base = OTHER; note = 2-prime deoxy-2-prime-F RNA nucleotides
  modified_base 1^2: mod_base = OTHER; note = Phosphorothioate
  modified_base 2^3: mod_base = OTHER; note = Phosphorothioate
  modified_base 17^18: mod_base = OTHER; note = Phosphorothioate
  modified_base 18^19: mod_base = OTHER; note = Phosphorothioate
tccagaatccatcagcctc

SEQ ID NO: 561 - RNA, 19 nt, synthetic construct
  source 1..19: mol_type = other RNA
  ncRNA 1..19: ncRNA_class = siRNA
  modified_base order(1..6,10..19): mod_base = OTHER; note = 2-prime-O-Methyl RNA nucleotides
  modified_base 7..9: mod_base = OTHER; note = 2-prime deoxy-2-prime-F RNA nucleotides
  modified_base 1^2: mod_base = OTHER; note = Phosphorothioate
  modified_base 2^3: mod_base = OTHER; note = Phosphorothioate
  modified_base 17^18: mod_base = OTHER; note = Phosphorothioate
  modified_base 18^19: mod_base = OTHER; note = Phosphorothioate
gaggctgatggattctgga

SEQ ID NO: 562 - RNA, 19 nt, synthetic construct
  source 1..19: mol_type = other RNA
  ncRNA 1..19: ncRNA_class = siRNA
  modified_base order(1,3,5,7,9,11,13,15,17,19): mod_base = OTHER; note = 2-prime-O-Methyl RNA nucleotides
  modified_base order(2,4,6,8,10,12,14,16,18): mod_base = OTHER; note = 2-prime deoxy-2-prime-F RNA nucleotides
  modified_base 1^2: mod_base = OTHER; note = Phosphorothioate
  modified_base 2^3: mod_base = OTHER; note = Phosphorothioate
  modified_base 17^18: mod_base = OTHER; note = Phosphorothioate
  modified_base 18^19: mod_base = OTHER; note = Phosphorothioate
aaggattcagcttcttttc

SEQ ID NO: 563 - RNA, 19 nt, synthetic construct
  source 1..19: mol_type = other RNA
  ncRNA 1..19: ncRNA_class = siRNA
  modified_base order(1..6,10..19): mod_base = OTHER; note = 2-prime-O-Methyl RNA nucleotides
  modified_base 7..9: mod_base = OTHER; note = 2-prime deoxy-2-prime-F RNA nucleotides
  modified_base 1^2: mod_base = OTHER; note = Phosphorothioate
  modified_base 2^3: mod_base = OTHER; note = Phosphorothioate
  modified_base 17^18: mod_base = OTHER; note = Phosphorothioate
  modified_base 18^19: mod_base = OTHER; note = Phosphorothioate
gaaaagaagctgaatcctt

SEQ ID NO: 564 - RNA, 19 nt, synthetic construct
  source 1..19: mol_type = other RNA
  ncRNA 1..19: ncRNA_class = siRNA
  modified_base order(1,3,5,7,9,11,13,15,17,19): mod_base = OTHER; note = 2-prime-O-Methyl RNA nucleotides
  modified_base order(2,4,6,8,10,12,14,16,18): mod_base = OTHER; note = 2-prime deoxy-2-prime-F RNA nucleotides
  modified_base 1^2: mod_base = OTHER; note = Phosphorothioate
  modified_base 2^3: mod_base = OTHER; note = Phosphorothioate
  modified_base 17^18: mod_base = OTHER; note = Phosphorothioate
  modified_base 18^19: mod_base = OTHER; note = Phosphorothioate
tgaatcacagctttgtagg

SEQ ID NO: 565 - RNA, 19 nt, synthetic construct
  source 1..19: mol_type = other RNA
  ncRNA 1..19: ncRNA_class = siRNA
  modified_base order(1..6,10..19): mod_base = OTHER; note = 2-prime-O-Methyl RNA nucleotides
  modified_base 7..9: mod_base = OTHER; note = 2-prime deoxy-2-prime-F RNA nucleotides
  modified_base 1^2: mod_base = OTHER; note = Phosphorothioate
  modified_base 2^3: mod_base = OTHER; note = Phosphorothioate
  modified_base 17^18: mod_base = OTHER; note = Phosphorothioate
  modified_base 18^19: mod_base = OTHER; note = Phosphorothioate
cctacaaagctgtgattca

SEQ ID NO: 566 - RNA, 19 nt, synthetic construct
  source 1..19: mol_type = other RNA
  ncRNA 1..19: ncRNA_class = siRNA
  modified_base order(1,3,5,7,9,11,13,15,17,19): mod_base = OTHER; note = 2-prime-O-Methyl RNA nucleotides
  modified_base order(2,4,6,8,10,12,14,16,18): mod_base = OTHER; note = 2-prime deoxy-2-prime-F RNA nucleotides
  modified_base 1^2: mod_base = OTHER; note = Phosphorothioate
  modified_base 2^3: mod_base = OTHER; note = Phosphorothioate
  modified_base 17^18: mod_base = OTHER; note = Phosphorothioate
  modified_base 18^19: mod_base = OTHER; note = Phosphorothioate
gtgggtgaagtagaggcgc

SEQ ID NO: 567 - RNA, 19 nt, synthetic construct
  source 1..19: mol_type = other RNA
  ncRNA 1..19: ncRNA_class = siRNA
  modified_base order(1..6,10..19): mod_base = OTHER; note = 2-prime-O-Methyl RNA nucleotides
  modified_base 7..9: mod_base = OTHER; note = 2-prime deoxy-2-prime-F RNA nucleotides
  modified_base 1^2: mod_base = OTHER; note = Phosphorothioate
  modified_base 2^3: mod_base = OTHER; note = Phosphorothioate
  modified_base 17^18: mod_base = OTHER; note = Phosphorothioate
  modified_base 18^19: mod_base = OTHER; note = Phosphorothioate
gcgcctctacttcacccac

SEQ ID NO: 568 - RNA, 19 nt, synthetic construct
  source 1..19: mol_type = other RNA
  ncRNA 1..19: ncRNA_class = siRNA
  modified_base order(1,3,5,7,9,11,13,15,17,19): mod_base = OTHER; note = 2-prime-O-Methyl RNA nucleotides
  modified_base order(2,4,6,8,10,12,14,16,18): mod_base = OTHER; note = 2-prime deoxy-2-prime-F RNA nucleotides
  modified_base 1^2: mod_base = OTHER; note = Phosphorothioate
  modified_base 2^3: mod_base = OTHER; note = Phosphorothioate
  modified_base 17^18: mod_base = OTHER; note = Phosphorothioate
  modified_base 18^19: mod_base = OTHER; note = Phosphorothioate
ccagaatccatcagcctca

SEQ ID NO: 569 - RNA, 19 nt, synthetic construct
  source 1..19: mol_type = other RNA
  ncRNA 1..19: ncRNA_class = siRNA
  modified_base order(1..6,10..19): mod_base = OTHER; note = 2-prime-O-Methyl RNA nucleotides
  modified_base 7..9: mod_base = OTHER; note = 2-prime deoxy-2-prime-F RNA nucleotides
  modified_base 1^2: mod_base = OTHER; note = Phosphorothioate
  modified_base 2^3: mod_base = OTHER; note = Phosphorothioate
  modified_base 17^18: mod_base = OTHER; note = Phosphorothioate
  modified_base 18^19: mod_base = OTHER; note = Phosphorothioate
tgaggctgatggattctgg

SEQ ID NO: 570 - RNA, 19 nt, synthetic construct
  source 1..19: mol_type = other RNA
  ncRNA 1..19: ncRNA_class = siRNA
  modified_base order(1,3,5,7,9,11,13,15,17,19): mod_base = OTHER; note = 2-prime-O-Methyl RNA nucleotides
  modified_base order(2,4,6,8,10,12,14,16,18): mod_base = OTHER; note = 2-prime deoxy-2-prime-F RNA nucleotides
  modified_base 1^2: mod_base = OTHER; note = Phosphorothioate
  modified_base 2^3: mod_base = OTHER; note = Phosphorothioate
  modified_base 17^18: mod_base = OTHER; note = Phosphorothioate
  modified_base 18^19: mod_base = OTHER; note = Phosphorothioate
cattgtgtagaaggtctct

SEQ ID NO: 571 - RNA, 19 nt, synthetic construct
  source 1..19: mol_type = other RNA
  ncRNA 1..19: ncRNA_class = siRNA
  modified_base order(1..6,10..19): mod_base = OTHER; note = 2-prime-O-Methyl RNA nucleotides
  modified_base 7..9: mod_base = OTHER; note = 2-prime deoxy-2-prime-F RNA nucleotides
  modified_base 1^2: mod_base = OTHER; note = Phosphorothioate
  modified_base 2^3: mod_base = OTHER; note = Phosphorothioate
  modified_base 17^18: mod_base = OTHER; note = Phosphorothioate
  modified_base 18^19: mod_base = OTHER; note = Phosphorothioate
agagaccttctacacaatg

SEQ ID NO: 572 - RNA, 19 nt, synthetic construct
  source 1..19: mol_type = other RNA
  ncRNA 1..19: ncRNA_class = siRNA
  modified_base order(1,3,5,7,9,11,13,15,17,19): mod_base = OTHER; note = 2-prime-O-Methyl RNA nucleotides
  modified_base order(2,4,6,8,10,12,14,16,18): mod_base = OTHER; note = 2-prime deoxy-2-prime-F RNA nucleotides
  modified_base 1^2: mod_base = OTHER; note = Phosphorothioate
  modified_base 2^3: mod_base = OTHER; note = Phosphorothioate
  modified_base 17^18: mod_base = OTHER; note = Phosphorothioate
  modified_base 18^19: mod_base = OTHER; note = Phosphorothioate
tttggcttgcacaggtgaa

SEQ ID NO: 573 - RNA, 19 nt, synthetic construct
  source 1..19: mol_type = other RNA
  ncRNA 1..19: ncRNA_class = siRNA
  modified_base order(1..6,10..19): mod_base = OTHER; note = 2-prime-O-Methyl RNA nucleotides
  modified_base 7..9: mod_base = OTHER; note = 2-prime deoxy-2-prime-F RNA nucleotides
  modified_base 1^2: mod_base = OTHER; note = Phosphorothioate
  modified_base 2^3: mod_base = OTHER; note = Phosphorothioate
  modified_base 17^18: mod_base = OTHER; note = Phosphorothioate
  modified_base 18^19: mod_base = OTHER; note = Phosphorothioate
ttcacctgtgcaagccaaa

SEQ ID NO: 574 - RNA, 19 nt, synthetic construct
  source 1..19: mol_type = other RNA
  ncRNA 1..19: ncRNA_class = siRNA
  modified_base order(1,3,5,7,9,11,13,15,17,19): mod_base = OTHER; note = 2-prime-O-Methyl RNA nucleotides
  modified_base order(2,4,6,8,10,12,14,16,18): mod_base = OTHER; note = 2-prime deoxy-2-prime-F RNA nucleotides
  modified_base 1^2: mod_base = OTHER; note = Phosphorothioate
  modified_base 2^3: mod_base = OTHER; note = Phosphorothioate
  modified_base 17^18: mod_base = OTHER; note = Phosphorothioate
  modified_base 18^19: mod_base = OTHER; note = Phosphorothioate
caattcatggaaccccagg

SEQ ID NO: 575 - RNA, 19 nt, synthetic construct
  source 1..19: mol_type = other RNA
  ncRNA 1..19: ncRNA_class = siRNA
  modified_base order(1..6,10..19): mod_base = OTHER; note = 2-prime-O-Methyl RNA nucleotides
  modified_base 7..9: mod_base = OTHER; note = 2-prime deoxy-2-prime-F RNA nucleotides
  modified_base 1^2: mod_base = OTHER; note = Phosphorothioate
  modified_base 2^3: mod_base = OTHER; note = Phosphorothioate
  modified_base 17^18: mod_base = OTHER; note = Phosphorothioate
  modified_base 18^19: mod_base = OTHER; note = Phosphorothioate
cctggggttccatgaattg

SEQ ID NO: 576 - RNA, 19 nt, synthetic construct
  source 1..19: mol_type = other RNA
  ncRNA 1..19: ncRNA_class = siRNA
  modified_base order(1,3,5,7,9,11,13,15,17,19): mod_base = OTHER; note = 2-prime-O-Methyl RNA nucleotides
  modified_base order(2,4,6,8,10,12,14,16,18): mod_base = OTHER; note = 2-prime deoxy-2-prime-F RNA nucleotides
  modified_base 1^2: mod_base = OTHER; note = Phosphorothioate
  modified_base 2^3: mod_base = OTHER; note = Phosphorothioate
  modified_base 17^18: mod_base = OTHER; note = Phosphorothioate
  modified_base 18^19: mod_base = OTHER; note = Phosphorothioate
cttcacagctgtactgaat

SEQ ID NO: 577 - RNA, 19 nt, synthetic construct
  source 1..19: mol_type = other RNA
  ncRNA 1..19: ncRNA_class = siRNA
  modified_base order(1..6,10..19): mod_base = OTHER; note = 2-prime-O-Methyl RNA nucleotides
  modified_base 7..9: mod_base = OTHER; note = 2-prime deoxy-2-prime-F RNA nucleotides
  modified_base 1^2: mod_base = OTHER; note = Phosphorothioate
  modified_base 2^3: mod_base = OTHER; note = Phosphorothioate
  modified_base 17^18: mod_base = OTHER; note = Phosphorothioate
  modified_base 18^19: mod_base = OTHER; note = Phosphorothioate
attcagtacagctgtgaag

SEQ ID NO: 578 - RNA, 19 nt, synthetic construct
  source 1..19: mol_type = other RNA
  ncRNA 1..19: ncRNA_class = siRNA
  modified_base order(1,3,5,7,9,11,13,15,17,19): mod_base = OTHER; note = 2-prime-O-Methyl RNA nucleotides
  modified_base order(2,4,6,8,10,12,14,16,18): mod_base = OTHER; note = 2-prime deoxy-2-prime-F RNA nucleotides
  modified_base 1^2: mod_base = OTHER; note = Phosphorothioate
  modified_base 2^3: mod_base = OTHER; note = Phosphorothioate
  modified_base 17^18: mod_base = OTHER; note = Phosphorothioate
  modified_base 18^19: mod_base = OTHER; note = Phosphorothioate
gctgcatagaaggcctcga

SEQ ID NO: 579 - RNA, 19 nt, synthetic construct
  source 1..19: mol_type = other RNA
  ncRNA 1..19: ncRNA_class = siRNA
  modified_base order(1..6,10..19): mod_base = OTHER; note = 2-prime-O-Methyl RNA nucleotides
  modified_base 7..9: mod_base = OTHER; note = 2-prime deoxy-2-prime-F RNA nucleotides
  modified_base 1^2: mod_base = OTHER; note = Phosphorothioate
  modified_base 2^3: mod_base = OTHER; note = Phosphorothioate
  modified_base 17^18: mod_base = OTHER; note = Phosphorothioate
  modified_base 18^19: mod_base = OTHER; note = Phosphorothioate
tcgaggccttctatgcagc

SEQ ID NO: 580 - RNA, 19 nt, synthetic construct
  source 1..19: mol_type = other RNA
  ncRNA 1..19: ncRNA_class = siRNA
  modified_base order(1,3,5,7,9,11,13,15,17,19): mod_base = OTHER; note = 2-prime-O-Methyl RNA nucleotides
  modified_base order(2,4,6,8,10,12,14,16,18): mod_base = OTHER; note = 2-prime deoxy-2-prime-F RNA nucleotides
  modified_base 1^2: mod_base = OTHER; note = Phosphorothioate
  modified_base 2^3: mod_base = OTHER; note = Phosphorothioate
  modified_base 17^18: mod_base = OTHER; note = Phosphorothioate
  modified_base 18^19: mod_base = OTHER; note = Phosphorothioate
gaatccatcagcctcacac

SEQ ID NO: 581 - RNA, 19 nt, synthetic construct
  source 1..19: mol_type = other RNA
  ncRNA 1..19: ncRNA_class = siRNA
  modified_base order(1..6,10..19): mod_base = OTHER; note = 2-prime-O-Methyl RNA nucleotides
  modified_base 7..9: mod_base = OTHER; note = 2-prime deoxy-2-prime-F RNA nucleotides
  modified_base 1^2: mod_base = OTHER; note = Phosphorothioate
  modified_base 2^3: mod_base = OTHER; note = Phosphorothioate
  modified_base 17^18: mod_base = OTHER; note = Phosphorothioate
  modified_base 18^19: mod_base = OTHER; note = Phosphorothioate
gtgtgaggctgatggattc

SEQ ID NO: 582 - RNA, 19 nt, synthetic construct
  source 1..19: mol_type = other RNA
  ncRNA 1..19: ncRNA_class = siRNA
  modified_base order(1,3,5,7,9,11,13,15,17,19): mod_base = OTHER; note = 2-prime-O-Methyl RNA nucleotides
  modified_base order(2,4,6,8,10,12,14,16,18): mod_base = OTHER; note = 2-prime deoxy-2-prime-F RNA nucleotides
  modified_base 1^2: mod_base = OTHER; note = Phosphorothioate
  modified_base 2^3: mod_base = OTHER; note = Phosphorothioate
  modified_base 17^18: mod_base = OTHER; note = Phosphorothioate
  modified_base 18^19: mod_base = OTHER; note = Phosphorothioate
aatccatcagcctcacaca

SEQ ID NO: 583 - RNA, 19 nt, synthetic construct
  source 1..19: mol_type = other RNA
  ncRNA 1..19: ncRNA_class = siRNA
  modified_base order(1..6,10..19): mod_base = OTHER; note = 2-prime-O-Methyl RNA nucleotides
  modified_base 7..9: mod_base = OTHER; note = 2-prime deoxy-2-prime-F RNA nucleotides
  modified_base 1^2: mod_base = OTHER; note = Phosphorothioate
  modified_base 2^3: mod_base = OTHER; note = Phosphorothioate
  modified_base 17^18: mod_base = OTHER; note = Phosphorothioate
  modified_base 18^19: mod_base = OTHER; note = Phosphorothioate
tgtgtgaggctgatggatt

SEQ ID NO: 584 - RNA, 19 nt, synthetic construct
  source 1..19: mol_type = other RNA
  ncRNA 1..19: ncRNA_class = siRNA
  modified_base order(1,3,5,7,9,11,13,15,17,19): mod_base = OTHER; note = 2-prime-O-Methyl RNA nucleotides
  modified_base order(2,4,6,8,10,12,14,16,18): mod_base = OTHER; note = 2-prime deoxy-2-prime-F RNA nucleotides
  modified_base 1^2: mod_base = OTHER; note = Phosphorothioate
  modified_base 2^3: mod_base = OTHER; note = Phosphorothioate
  modified_base 17^18: mod_base = OTHER; note = Phosphorothioate
  modified_base 18^19: mod_base = OTHER; note = Phosphorothioate
agtgggtgaagtagaggcg

SEQ ID NO: 585 - RNA, 19 nt, synthetic construct
  source 1..19: mol_type = other RNA
  ncRNA 1..19: ncRNA_class = siRNA
  modified_base order(1..6,10..19): mod_base = OTHER; note = 2-prime-O-Methyl RNA nucleotides
  modified_base 7..9: mod_base = OTHER; note = 2-prime deoxy-2-prime-F RNA nucleotides
  modified_base 1^2: mod_base = OTHER; note = Phosphorothioate
  modified_base 2^3: mod_base = OTHER; note = Phosphorothioate
  modified_base 17^18: mod_base = OTHER; note = Phosphorothioate
  modified_base 18^19: mod_base = OTHER; note = Phosphorothioate
cgcctctacttcacccact

SEQ ID NO: 586 - RNA, 19 nt, synthetic construct
  source 1..19: mol_type = other RNA
  ncRNA 1..19: ncRNA_class = siRNA
  modified_base order(1,3,5,7,9,11,13,15,17,19): mod_base = OTHER; note = 2-prime-O-Methyl RNA nucleotides
  modified_base order(2,4,6,8,10,12,14,16,18): mod_base = OTHER; note = 2-prime deoxy-2-prime-F RNA nucleotides
  modified_base 1^2: mod_base = OTHER; note = Phosphorothioate
  modified_base 2^3: mod_base = OTHER; note = Phosphorothioate
  modified_base 17^18: mod_base = OTHER; note = Phosphorothioate
  modified_base 18^19: mod_base = OTHER; note = Phosphorothioate
ctcgtccagaatccatcag

SEQ ID NO: 587 - RNA, 19 nt, synthetic construct
  source 1..19: mol_type = other RNA
  ncRNA 1..19: ncRNA_class = siRNA
  modified_base order(1..6,10..19): mod_base = OTHER; note = 2-prime-O-Methyl RNA nucleotides
  modified_base 7..9: mod_base = OTHER; note = 2-prime deoxy-2-prime-F RNA nucleotides
  modified_base 1^2: mod_base = OTHER; note = Phosphorothioate
  modified_base 2^3: mod_base = OTHER; note = Phosphorothioate
  modified_base 17^18: mod_base = OTHER; note = Phosphorothioate
  modified_base 18^19: mod_base = OTHER; note = Phosphorothioate
ctgatggattctggacgag

SEQ ID NO: 588 - RNA, 19 nt, synthetic construct
  source 1..19: mol_type = other RNA
  ncRNA 1..19: ncRNA_class = siRNA
  modified_base order(1,3,5,7,9,11,13,15,17,19): mod_base = OTHER; note = 2-prime-O-Methyl RNA nucleotides
  modified_base order(2,4,6,8,10,12,14,16,18): mod_base = OTHER; note = 2-prime deoxy-2-prime-F RNA nucleotides
  modified_base 1^2: mod_base = OTHER; note = Phosphorothioate
  modified_base 2^3: mod_base = OTHER; note = Phosphorothioate
  modified_base 17^18: mod_base = OTHER; note = Phosphorothioate
  modified_base 18^19: mod_base = OTHER; note = Phosphorothioate
ttggagtagtcggagcgga

SEQ ID NO: 589 - RNA, 19 nt, synthetic construct
  source 1..19: mol_type = other RNA
  ncRNA 1..19: ncRNA_class = siRNA
  modified_base order(1..6,10..19): mod_base = OTHER; note = 2-prime-O-Methyl RNA nucleotides
  modified_base 7..9: mod_base = OTHER; note = 2-prime deoxy-2-prime-F RNA nucleotides
  modified_base 1^2: mod_base = OTHER; note = Phosphorothioate
  modified_base 2^3: mod_base = OTHER; note = Phosphorothioate
  modified_base 17^18: mod_base = OTHER; note = Phosphorothioate
  modified_base 18^19: mod_base = OTHER; note = Phosphorothioate
tccgctccgactactccaa

SEQ ID NO: 590 - RNA, 19 nt, synthetic construct
  source 1..19: mol_type = other RNA
  ncRNA 1..19: ncRNA_class = siRNA
  modified_base order(1,3,5,7,9,11,13,15,17,19): mod_base = OTHER; note = 2-prime-O-Methyl RNA nucleotides
  modified_base order(2,4,6,8,10,12,14,16,18): mod_base = OTHER; note = 2-prime deoxy-2-prime-F RNA nucleotides
  modified_base 1^2: mod_base = OTHER; note = Phosphorothioate
  modified_base 2^3: mod_base = OTHER; note = Phosphorothioate
  modified_base 17^18: mod_base = OTHER; note = Phosphorothioate
  modified_base 18^19: mod_base = OTHER; note = Phosphorothioate
acaattcatggaaccccag

SEQ ID NO: 591 - RNA, 19 nt, synthetic construct
  source 1..19: mol_type = other RNA
  ncRNA 1..19: ncRNA_class = siRNA
  modified_base order(1..6,10..19): mod_base = OTHER; note = 2-prime-O-Methyl RNA nucleotides
  modified_base 7..9: mod_base = OTHER; note = 2-prime deoxy-2-prime-F RNA nucleotides
  modified_base 1^2: mod_base = OTHER; note = Phosphorothioate
  modified_base 2^3: mod_base = OTHER; note = Phosphorothioate
  modified_base 17^18: mod_base = OTHER; note = Phosphorothioate
  modified_base 18^19: mod_base = OTHER; note = Phosphorothioate
ctggggttccatgaattgt

SEQ ID NO: 592 - RNA, 19 nt, synthetic construct
  source 1..19: mol_type = other RNA
  ncRNA 1..19: ncRNA_class = siRNA
  modified_base order(1,3,5,7,9,11,13,15,17,19): mod_base = OTHER; note = 2-prime-O-Methyl RNA nucleotides
  modified_base order(2,4,6,8,10,12,14,16,18): mod_base = OTHER; note = 2-prime deoxy-2-prime-F RNA nucleotides
  modified_base 1^2: mod_base = OTHER; note = Phosphorothioate
  modified_base 2^3: mod_base = OTHER; note = Phosphorothioate
  modified_base 17^18: mod_base = OTHER; note = Phosphorothioate
  modified_base 18^19: mod_base = OTHER; note = Phosphorothioate
ggtctcttcacagctgtac

SEQ ID NO: 593 - RNA, 19 nt, synthetic construct
  source 1..19: mol_type = other RNA
  ncRNA 1..19: ncRNA_class = siRNA
  modified_base order(1..6,10..19): mod_base = OTHER; note = 2-prime-O-Methyl RNA nucleotides
  modified_base 7..9: mod_base = OTHER; note = 2-prime deoxy-2-prime-F RNA nucleotides
  modified_base 1^2: mod_base = OTHER; note = Phosphorothioate
  modified_base 2^3: mod_base = OTHER; note = Phosphorothioate
  modified_base 17^18: mod_base = OTHER; note = Phosphorothioate
  modified_base 18^19: mod_base = OTHER; note = Phosphorothioate
gtacagctgtgaagagacc

SEQ ID NO: 594 - RNA, 19 nt, synthetic construct
  source 1..19: mol_type = other RNA
  ncRNA 1..19: ncRNA_class = siRNA
  modified_base order(1,3,5,7,9,11,13,15,17,19): mod_base = OTHER; note = 2-prime-O-Methyl RNA nucleotides
  modified_base order(2,4,6,8,10,12,14,16,18): mod_base = OTHER; note = 2-prime deoxy-2-prime-F RNA nucleotides
  modified_base 1^2: mod_base = OTHER; note = Phosphorothioate
  modified_base 2^3: mod_base = OTHER; note = Phosphorothioate
  modified_base 17^18: mod_base = OTHER; note = Phosphorothioate
  modified_base 18^19: mod_base = OTHER; note = Phosphorothioate
acagctgtactgaatcaca

SEQ ID NO: 595 - RNA, 19 nt, synthetic construct
  source 1..19: mol_type = other RNA
  ncRNA 1..19: ncRNA_class = siRNA
  modified_base order(1..6,10..19): mod_base = OTHER; note = 2-prime-O-Methyl RNA nucleotides
  modified_base 7..9: mod_base = OTHER; note = 2-prime deoxy-2-prime-F RNA nucleotides
  modified_base 1^2: mod_base = OTHER; note = Phosphorothioate
  modified_base 2^3: mod_base = OTHER; note = Phosphorothioate
  modified_base 17^18: mod_base = OTHER; note = Phosphorothioate
  modified_base 18^19: mod_base = OTHER; note = Phosphorothioate
tgtgattcagtacagctgt

SEQ ID NO: 596 - RNA, 19 nt, synthetic construct
  source 1..19: mol_type = other RNA
  ncRNA 1..19: ncRNA_class = siRNA
  modified_base order(1,3,5,7,9,11,13,15,17,19): mod_base = OTHER; note = 2-prime-O-Methyl RNA nucleotides
  modified_base order(2,4,6,8,10,12,14,16,18): mod_base = OTHER; note = 2-prime deoxy-2-prime-F RNA nucleotides
  modified_base 1^2: mod_base = OTHER; note = Phosphorothioate
  modified_base 2^3: mod_base = OTHER; note = Phosphorothioate
  modified_base 17^18: mod_base = OTHER; note = Phosphorothioate
  modified_base 18^19: mod_base = OTHER; note = Phosphorothioate
cgatccagggaatatagtt

SEQ ID NO: 597 - RNA, 19 nt, synthetic construct
  source 1..19: mol_type = other RNA
  ncRNA 1..19: ncRNA_class = siRNA
  modified_base order(1..6,10..19): mod_base = OTHER; note = 2-prime-O-Methyl RNA nucleotides
  modified_base 7..9: mod_base = OTHER; note = 2-prime deoxy-2-prime-F RNA nucleotides
  modified_base 1^2: mod_base = OTHER; note = Phosphorothioate
  modified_base 2^3: mod_base = OTHER; note = Phosphorothioate
  modified_base 17^18: mod_base = OTHER; note = Phosphorothioate
  modified_base 18^19: mod_base = OTHER; note = Phosphorothioate
aactatattccctggatcg

SEQ ID NO: 598 - RNA, 19 nt, synthetic construct
  source 1..19: mol_type = other RNA
  ncRNA 1..19: ncRNA_class = siRNA
  modified_base order(1,3,5,7,9,11,13,15,17,19): mod_base = OTHER; note = 2-prime-O-Methyl RNA nucleotides
  modified_base order(2,4,6,8,10,12,14,16,18): mod_base = OTHER; note = 2-prime deoxy-2-prime-F RNA nucleotides
  modified_base 1^2: mod_base = OTHER; note = Phosphorothioate
  modified_base 2^3: mod_base = OTHER; note = Phosphorothioate
  modified_base 17^18: mod_base = OTHER; note = Phosphorothioate
  modified_base 18^19: mod_base = OTHER; note = Phosphorothioate
ctcctttggagctcgtcca

SEQ ID NO: 599 - RNA, 19 nt, synthetic construct
  source 1..19: mol_type = other RNA
  ncRNA 1..19: ncRNA_class = siRNA
  modified_base order(1..6,10..19): mod_base = OTHER; note = 2-prime-O-Methyl RNA nucleotides
  modified_base 7..9: mod_base = OTHER; note = 2-prime deoxy-2-prime-F RNA nucleotides
  modified_base 1^2: mod_base = OTHER; note = Phosphorothioate
  modified_base 2^3: mod_base = OTHER; note = Phosphorothioate
  modified_base 17^18: mod_base = OTHER; note = Phosphorothioate
  modified_base 18^19: mod_base = OTHER; note = Phosphorothioate
tggacgagctccaaaggag

SEQ ID NO: 600 - RNA, 19 nt, synthetic construct
  source 1..19: mol_type = other RNA
  ncRNA 1..19: ncRNA_class = siRNA
  modified_base order(1,3,5,7,9,11,13,15,17,19): mod_base = OTHER; note = 2-prime-O-Methyl RNA nucleotides
  modified_base order(2,4,6,8,10,12,14,16,18): mod_base = OTHER; note = 2-prime deoxy-2-prime-F RNA nucleotides
  modified_base 1^2: mod_base = OTHER; note = Phosphorothioate
  modified_base 2^3: mod_base = OTHER; note = Phosphorothioate
  modified_base 17^18: mod_base = OTHER; note = Phosphorothioate
  modified_base 18^19: mod_base = OTHER; note = Phosphorothioate
tagatcatcaggagggcca

SEQ ID NO: 601 - RNA, 19 nt, synthetic construct
  source 1..19: mol_type = other RNA
  ncRNA 1..19: ncRNA_class = siRNA
  modified_base order(1..6,10..19): mod_base = OTHER; note = 2-prime-O-Methyl RNA nucleotides
  modified_base 7..9: mod_base = OTHER; note = 2-prime deoxy-2-prime-F RNA nucleotides
  modified_base 1^2: mod_base = OTHER; note = Phosphorothioate
  modified_base 2^3: mod_base = OTHER; note = Phosphorothioate
  modified_base 17^18: mod_base = OTHER; note = Phosphorothioate
  modified_base 18^19: mod_base = OTHER; note = Phosphorothioate
tggccctcctgatgatcta

SEQ ID NO: 602 - RNA, 19 nt, synthetic construct
  source 1..19: mol_type = other RNA
  ncRNA 1..19: ncRNA_class = siRNA
  modified_base order(1,3,5,7,9,11,13,15,17,19): mod_base = OTHER; note = 2-prime-O-Methyl RNA nucleotides
  modified_base order(2,4,6,8,10,12,14,16,18): mod_base = OTHER; note = 2-prime deoxy-2-prime-F RNA nucleotides
  modified_base 1^2: mod_base = OTHER; note = Phosphorothioate
  modified_base 2^3: mod_base = OTHER; note = Phosphorothioate
  modified_base 17^18: mod_base = OTHER; note = Phosphorothioate
  modified_base 18^19: mod_base = OTHER; note = Phosphorothioate
ccacaattcatggaacccc

SEQ ID NO: 603 - RNA, 19 nt, synthetic construct
  source 1..19: mol_type = other RNA
  ncRNA 1..19: ncRNA_class = siRNA
  modified_base order(1..6,10..19): mod_base = OTHER; note = 2-prime-O-Methyl RNA nucleotides
  modified_base 7..9: mod_base = OTHER; note = 2-prime deoxy-2-prime-F RNA nucleotides
  modified_base 1^2: mod_base = OTHER; note = Phosphorothioate
  modified_base 2^3: mod_base = OTHER; note = Phosphorothioate
  modified_base 17^18: mod_base = OTHER; note = Phosphorothioate
  modified_base 18^19: mod_base = OTHER; note = Phosphorothioate
ggggttccatgaattgtgg

SEQ ID NO: 604 - RNA, 19 nt, synthetic construct
  source 1..19: mol_type = other RNA
  ncRNA 1..19: ncRNA_class = siRNA
  modified_base order(1,3,5,7,9,11,13,15,17,19): mod_base = OTHER; note = 2-prime-O-Methyl RNA nucleotides
  modified_base order(2,4,6,8,10,12,14,16,18): mod_base = OTHER; note = 2-prime deoxy-2-prime-F RNA nucleotides
  modified_base 1^2: mod_base = OTHER; note = Phosphorothioate
  modified_base 2^3: mod_base = OTHER; note = Phosphorothioate
  modified_base 17^18: mod_base = OTHER; note = Phosphorothioate
  modified_base 18^19: mod_base = OTHER; note = Phosphorothioate
catagaaggcctcgaaccc

SEQ ID NO: 605 - RNA, 19 nt, synthetic construct
  source 1..19: mol_type = other RNA
  ncRNA 1..19: ncRNA_class = siRNA
  modified_base order(1..6,10..19): mod_base = OTHER; note = 2-prime-O-Methyl RNA nucleotides
  modified_base 7..9: mod_base = OTHER; note = 2-prime deoxy-2-prime-F RNA nucleotides
  modified_base 1^2: mod_base = OTHER; note = Phosphorothioate
  modified_base 2^3: mod_base = OTHER; note = Phosphorothioate
  modified_base 17^18: mod_base = OTHER; note = Phosphorothioate
  modified_base 18^19: mod_base = OTHER; note = Phosphorothioate
gggttcgaggccttctatg

SEQ ID NO: 606 - RNA, 19 nt, synthetic construct
  source 1..19: mol_type = other RNA
  modified_base order(1,3,5,7,9,11,13,15,17,19): mod_base = OTHER; note = 2-prime-O-Methyl RNA nucleotides
  modified_base order(2,4,6,8,10,12,14,16,18): mod_base = OTHER; note = 2-prime deoxy-2-prime-F RNA nucleotides
  modified_base 1^2: mod_base = OTHER; note = Phosphorothioate
  modified_base 2^3: mod_base = OTHER; note = Phosphorothioate
  modified_base 17^18: mod_base = OTHER; note = Phosphorothioate
  modified_base 18^19: mod_base = OTHER; note = Phosphorothioate
  ncRNA 1..19: ncRNA_class = siRNA
ttggagctcgtccagaatc

SEQ ID NO: 607 - RNA, 19 nt, synthetic construct
  source 1..19: mol_type = other RNA
  modified_base order(1..6,10..19): mod_base = OTHER; note = 2-prime-O-Methyl RNA nucleotides
  modified_base 7..9: mod_base = OTHER; note = 2-prime deoxy-2-prime-F RNA nucleotides
  modified_base 1^2: mod_base = OTHER; note = Phosphorothioate
  modified_base 2^3: mod_base = OTHER; note = Phosphorothioate
  modified_base 17^18: mod_base = OTHER; note = Phosphorothioate
  modified_base 18^19: mod_base = OTHER; note = Phosphorothioate
  ncRNA 1..19: ncRNA_class = siRNA
gattctggacgagctccaa

SEQ ID NO: 608 - RNA, 19 nt, synthetic construct
  source 1..19: mol_type = other RNA
  modified_base order(1,3,5,7,9,11,13,15,17,19): mod_base = OTHER; note = 2-prime-O-Methyl RNA nucleotides
  modified_base order(2,4,6,8,10,12,14,16,18): mod_base = OTHER; note = 2-prime deoxy-2-prime-F RNA nucleotides
  modified_base 1^2: mod_base = OTHER; note = Phosphorothioate
  modified_base 2^3: mod_base = OTHER; note = Phosphorothioate
  modified_base 17^18: mod_base = OTHER; note = Phosphorothioate
  modified_base 18^19: mod_base = OTHER; note = Phosphorothioate
  ncRNA 1..19: ncRNA_class = siRNA
ttctcgttggagtagtcgg

SEQ ID NO: 609 - RNA, 19 nt, synthetic construct
  source 1..19: mol_type = other RNA
  ncRNA 1..19: ncRNA_class = siRNA
  modified_base order(1..6,10..19): mod_base = OTHER; note = 2-prime-O-Methyl RNA nucleotides
  modified_base 7..9: mod_base = OTHER; note = 2-prime deoxy-2-prime-F RNA nucleotides
  modified_base 1^2: mod_base = OTHER; note = Phosphorothioate
  modified_base 2^3: mod_base = OTHER; note = Phosphorothioate
  modified_base 17^18: mod_base = OTHER; note = Phosphorothioate
  modified_base 18^19: mod_base = OTHER; note = Phosphorothioate
ccgactactccaacgagaa

SEQ ID NO: 610 - RNA, 19 nt, synthetic construct
  source 1..19: mol_type = other RNA
  ncRNA 1..19: ncRNA_class = siRNA
  modified_base order(1,3,5,7,9,11,13,15,17,19): mod_base = OTHER; note = 2-prime-O-Methyl RNA nucleotides
  modified_base order(2,4,6,8,10,12,14,16,18): mod_base = OTHER; note = 2-prime deoxy-2-prime-F RNA nucleotides
  modified_base 1^2: mod_base = OTHER; note = Phosphorothioate
  modified_base 2^3: mod_base = OTHER; note = Phosphorothioate
  modified_base 17^18: mod_base = OTHER; note = Phosphorothioate
  modified_base 18^19: mod_base = OTHER; note = Phosphorothioate
atgttctcgatccagggaa

SEQ ID NO: 611 - RNA, 19 nt, synthetic construct
  source 1..19: mol_type = other RNA
  ncRNA 1..19: ncRNA_class = siRNA
  modified_base order(1,6,10..19): mod_base = OTHER; note = 2-prime-O-Methyl RNA nucleotides
  modified_base 7..9: mod_base = OTHER; note = 2-prime deoxy-2-prime-F RNA nucleotides
  modified_base 1^2: mod_base = OTHER; note = Phosphorothioate
  modified_base 2^3: mod_base = OTHER; note = Phosphorothioate
  modified_base 17^18: mod_base = OTHER; note = Phosphorothioate
  modified_base 18^19: mod_base = OTHER; note = Phosphorothioate
ttccctggatcgagaacat

SEQ ID NO: 612 - RNA, 19 nt, synthetic construct
  source 1..19: mol_type = other RNA
  modified_base order(1,3,5,7,9,11,13,15,17,19): mod_base = OTHER; note = 2-prime-O-Methyl RNA nucleotides
  modified_base order(2,4,6,8,10,12,14,16,18): mod_base = OTHER; note = 2-prime deoxy-2-prime-F RNA nucleotides
  modified_base 1^2: mod_base = OTHER; note = Phosphorothioate
  modified_base 2^3: mod_base = OTHER; note = Phosphorothioate
  modified_base 17^18: mod_base = OTHER; note = Phosphorothioate
  modified_base 18^19: mod_base = OTHER; note = Phosphorothioate
  ncRNA 1..19: ncRNA_class = siRNA
aggtgcgcttgttacggtg

SEQ ID NO: 613 - RNA, 19 nt, synthetic construct
  source 1..19: mol_type = other RNA
  modified_base order(1..6,10..19): mod_base = OTHER; note = 2-prime-O-Methyl RNA nucleotides
  modified_base 7..9: mod_base = OTHER; note = 2-prime deoxy-2-prime-F RNA nucleotides
  modified_base 1^2: mod_base = OTHER; note = Phosphorothioate
  modified_base 2^3: mod_base = OTHER; note = Phosphorothioate
  modified_base 17^18: mod_base = OTHER; note = Phosphorothioate
  modified_base 18^19: mod_base = OTHER; note = Phosphorothioate
  ncRNA 1..19: ncRNA_class = siRNA
caccgtaacaagcgcacct

SEQ ID NO: 614 - RNA, 19 nt, synthetic construct
  source 1..19: mol_type = other RNA
  modified_base order(1,3,5,7,9,11,13,15,17,19): mod_base = OTHER; note = 2-prime-O-Methyl RNA nucleotides
  modified_base order(2,4,6,8,10,12,14,16,18): mod_base = OTHER; note = 2-prime deoxy-2-prime-F RNA nucleotides
  modified_base 1^2: mod_base = OTHER; note = Phosphorothioate
  modified_base 2^3: mod_base = OTHER; note = Phosphorothioate
  modified_base 17^18: mod_base = OTHER; note = Phosphorothioate
  modified_base 18^19: mod_base = OTHER; note = Phosphorothioate
  ncRNA 1..19: ncRNA_class = siRNA
cctccatatatacgccctc

SEQ ID NO: 615 - RNA, 19 nt, synthetic construct
  source 1..19: mol_type = other RNA
  ncRNA 1..19: ncRNA_class = siRNA
  modified_base order(1..6,10..19): mod_base = OTHER; note = 2-prime-O-Methyl RNA nucleotides
  modified_base 7..9: mod_base = OTHER; note = 2-prime deoxy-2-prime-F RNA nucleotides
  modified_base 1^2: mod_base = OTHER; note = Phosphorothioate
  modified_base 2^3: mod_base = OTHER; note = Phosphorothioate
  modified_base 17^18: mod_base = OTHER; note = Phosphorothioate
  modified_base 18^19: mod_base = OTHER; note = Phosphorothioate
gagggcgtatatatggagg

SEQ ID NO: 616 - RNA, 19 nt, synthetic construct
  source 1..19: mol_type = other RNA
  ncRNA 1..19: ncRNA_class = siRNA
  modified_base order(1,3,5,7,9,11,13,15,17,19): mod_base = OTHER; note = 2-prime-O-Methyl RNA nucleotides
  modified_base order(2,4,6,8,10,12,14,16,18): mod_base = OTHER; note = 2-prime deoxy-2-prime-F RNA nucleotides
  modified_base 1^2: mod_base = OTHER; note = Phosphorothioate
  modified_base 2^3: mod_base = OTHER; note = Phosphorothioate
  modified_base 17^18: mod_base = OTHER; note = Phosphorothioate
  modified_base 18^19: mod_base = OTHER; note = Phosphorothioate
tgctatgtcattgtcaaag

SEQ ID NO: 617 - RNA, 19 nt, synthetic construct
  source 1..19: mol_type = other RNA
  modified_base order(1..6,10..19): mod_base = OTHER; note = 2-prime-O-Methyl RNA nucleotides
  modified_base 7..9: mod_base = OTHER; note = 2-prime deoxy-2-prime-F RNA nucleotides
  modified_base 1^2: mod_base = OTHER; note = Phosphorothioate
  modified_base 2^3: mod_base = OTHER; note = Phosphorothioate
  modified_base 17^18: mod_base = OTHER; note = Phosphorothioate
  modified_base 18^19: mod_base = OTHER; note = Phosphorothioate
  ncRNA 1..19: ncRNA_class = siRNA
ctttgacaatgacatagca

SEQ ID NO: 618 - RNA, 19 nt, synthetic construct
  source 1..19: mol_type = other RNA
  modified_base order(1,3,5,7,9,11,13,15,17,19): mod_base = OTHER; note = 2-prime-O-Methyl RNA nucleotides
  modified_base order(2,4,6,8,10,12,14,16,18): mod_base = OTHER; note = 2-prime deoxy-2-prime-F RNA nucleotides
  modified_base 1^2: mod_base = OTHER; note = Phosphorothioate
  modified_base 2^3: mod_base = OTHER; note = Phosphorothioate
  modified_base 17^18: mod_base = OTHER; note = Phosphorothioate
  modified_base 18^19: mod_base = OTHER; note = Phosphorothioate
  ncRNA 1..19: ncRNA_class = siRNA
aaaatcaccaggttttgcc

SEQ ID NO: 619 - RNA, 19 nt, synthetic construct
  source 1..19: mol_type = other RNA
  modified_base order(1..6,10..19): mod_base = OTHER; note = 2-prime-O-Methyl RNA nucleotides
  modified_base 7..9: mod_base = OTHER; note = 2-prime deoxy-2-prime-F RNA nucleotides
  modified_base 1^2: mod_base = OTHER; note = Phosphorothioate
  modified_base 2^3: mod_base = OTHER; note = Phosphorothioate
  modified_base 17^18: mod_base = OTHER; note = Phosphorothioate
  modified_base 18^19: mod_base = OTHER; note = Phosphorothioate
  ncRNA 1..19: ncRNA_class = siRNA
ggcaaaacctggtgatttt

SEQ ID NO: 620 - RNA, 19 nt, synthetic construct
  source 1..19: mol_type = other RNA
  modified_base order(1,3,5,7,9,11,13,15,17,19): mod_base = OTHER; note = 2-prime-O-Methyl RNA nucleotides
  modified_base order(2,4,6,8,10,12,14,16,18): mod_base = OTHER; note = 2-prime deoxy-2-prime-F RNA nucleotides
  modified_base 1^2: mod_base = OTHER; note = Phosphorothioate
  modified_base 2^3: mod_base = OTHER; note = Phosphorothioate
  modified_base 17^18: mod_base = OTHER; note = Phosphorothioate
  modified_base 18^19: mod_base = OTHER; note = Phosphorothioate
  ncRNA 1..19: ncRNA_class = siRNA
ctcataaaggattcagctt

SEQ ID NO: 621 - RNA, 19 nt, synthetic construct
  source 1..19: mol_type = other RNA
  modified_base order(1..6,10..19): mod_base = OTHER; note = 2-prime-O-Methyl RNA nucleotides
  modified_base 7..9: mod_base = OTHER; note = 2-prime deoxy-2-prime-F RNA nucleotides
  modified_base 1^2: mod_base = OTHER; note = Phosphorothioate
  modified_base 2^3: mod_base = OTHER; note = Phosphorothioate
  modified_base 17^18: mod_base = OTHER; note = Phosphorothioate
  modified_base 18^19: mod_base = OTHER; note = Phosphorothioate
  ncRNA 1..19: ncRNA_class = siRNA
aagctgaatcctttatgag

SEQ ID NO: 622 - RNA, 19 nt, synthetic construct
  source 1..19: mol_type = other RNA
  modified_base order(1,3,5,7,9,11,13,15,17,19): mod_base = OTHER; note = 2-prime-O-Methyl RNA nucleotides
  modified_base order(2,4,6,8,10,12,14,16,18): mod_base = OTHER; note = 2-prime deoxy-2-prime-F RNA nucleotides
  modified_base 1^2: mod_base = OTHER; note = Phosphorothioate
  modified_base 2^3: mod_base = OTHER; note = Phosphorothioate
  modified_base 17^18: mod_base = OTHER; note = Phosphorothioate
  modified_base 18^19: mod_base = OTHER; note = Phosphorothioate
  ncRNA 1..19: ncRNA_class = siRNA
ttcatatgcagcagtacat

SEQ ID NO: 623 - RNA, 19 nt, synthetic construct
  source 1..19: mol_type = other RNA
  modified_base order(1..6,10..19): mod_base = OTHER; note = 2-prime-O-Methyl RNA nucleotides
  modified_base 7..9: mod_base = OTHER; note = 2-prime deoxy-2-prime-F RNA nucleotides
  modified_base 1^2: mod_base = OTHER; note = Phosphorothioate
  modified_base 2^3: mod_base = OTHER; note = Phosphorothioate
  modified_base 17^18: mod_base = OTHER; note = Phosphorothioate
  modified_base 18^19: mod_base = OTHER; note = Phosphorothioate
  ncRNA 1..19: ncRNA_class = siRNA
atgtactgctgcatatgaa

SEQ ID NO: 624 - RNA, 19 nt, synthetic construct
  source 1..19: mol_type = other RNA
  modified_base order(1,3,5,7,9,11,13,15,17,19): mod_base = OTHER; note = 2-prime-O-Methyl RNA nucleotides
  modified_base order(2,4,6,8,10,12,14,16,18): mod_base = OTHER; note = 2-prime deoxy-2-prime-F RNA nucleotides
  modified_base 1^2: mod_base = OTHER; note = Phosphorothioate
  modified_base 2^3: mod_base = OTHER; note = Phosphorothioate
  modified_base 17^18: mod_base = OTHER; note = Phosphorothioate
  modified_base 18^19: mod_base = OTHER; note = Phosphorothioate
  ncRNA 1..19: ncRNA_class = siRNA
ttgacgaagtcgtactcgc

SEQ ID NO: 625 - RNA, 19 nt, synthetic construct
  source 1..19: mol_type = other RNA
  modified_base order(1..6,10..19): mod_base = OTHER; note = 2-prime-O-Methyl RNA nucleotides
  modified_base 7..9: mod_base = OTHER; note = 2-prime deoxy-2-prime-F RNA nucleotides
  modified_base 1^2: mod_base = OTHER; note = Phosphorothioate
  modified_base 2^3: mod_base = OTHER; note = Phosphorothioate
  modified_base 17^18: mod_base = OTHER; note = Phosphorothioate
  modified_base 18^19: mod_base = OTHER; note = Phosphorothioate
  ncRNA 1..19: ncRNA_class = siRNA
gcgagtacgacttcgtcaa

SEQ ID NO: 626 - RNA, 19 nt, synthetic construct
  source 1..19: mol_type = other RNA
  modified_base order(1,3,5,7,9,11,13,15,17,19): mod_base = OTHER; note = 2-prime-O-Methyl RNA nucleotides
  modified_base order(2,4,6,8,10,12,14,16,18): mod_base = OTHER; note = 2-prime deoxy-2-prime-F RNA nucleotides
  modified_base 1^2: mod_base = OTHER; note = Phosphorothioate
  modified_base 2^3: mod_base = OTHER; note = Phosphorothioate
  modified_base 17^18: mod_base = OTHER; note = Phosphorothioate
  modified_base 18^19: mod_base = OTHER; note = Phosphorothioate
  ncRNA 1..19: ncRNA_class = siRNA
tagtcggagcggaaggtaa

SEQ ID NO: 627 - RNA, 19 nt, synthetic construct
  source 1..19: mol_type = other RNA
  modified_base order(1..6,10..19): mod_base = OTHER; note = 2-prime-O-Methyl RNA nucleotides
  modified_base 7..9: mod_base = OTHER; note = 2-prime deoxy-2-prime-F RNA nucleotides
  modified_base 1^2: mod_base = OTHER; note = Phosphorothioate
  modified_base 2^3: mod_base = OTHER; note = Phosphorothioate
  modified_base 17^18: mod_base = OTHER; note = Phosphorothioate
  modified_base 18^19: mod_base = OTHER; note = Phosphorothioate
  ncRNA 1..19: ncRNA_class = siRNA
ttaccttccgctccgacta

SEQ ID NO: 628 - RNA, 19 nt, synthetic construct
  source 1..19: mol_type = other RNA
  modified_base order(1,3,5,7,9,11,13,15,17,19): mod_base = OTHER; note = 2-prime-O-Methyl RNA nucleotides
  modified_base order(2,4,6,8,10,12,14,16,18): mod_base = OTHER; note = 2-prime deoxy-2-prime-F RNA nucleotides
  modified_base 1^2: mod_base = OTHER; note = Phosphorothioate
  modified_base 2^3: mod_base = OTHER; note = Phosphorothioate
  modified_base 17^18: mod_base = OTHER; note = Phosphorothioate
  modified_base 18^19: mod_base = OTHER; note = Phosphorothioate
  ncRNA 1..19: ncRNA_class = siRNA
tgatagtccacaaacaggc

SEQ ID NO: 629 - RNA, 19 nt, synthetic construct
  source 1..19: mol_type = other RNA
  modified_base order(1..6,10..19): mod_base = OTHER; note = 2-prime-O-Methyl RNA nucleotides
  modified_base 7..9: mod_base = OTHER; note = 2-prime deoxy-2-prime-F RNA nucleotides
  modified_base 1^2: mod_base = OTHER; note = Phosphorothioate
  modified_base 2^3: mod_base = OTHER; note = Phosphorothioate
  modified_base 17^18: mod_base = OTHER; note = Phosphorothioate
  modified_base 18^19: mod_base = OTHER; note = Phosphorothioate
  ncRNA 1..19: ncRNA_class = siRNA
gcctgtttgtggactatca

SEQ ID NO: 630 - RNA, 19 nt, synthetic construct
  source 1..19: mol_type = other RNA
  modified_base order(1,3,5,7,9,11,13,15,17,19): mod_base = OTHER; note = 2-prime-O-Methyl RNA nucleotides
  modified_base order(2,4,6,8,10,12,14,16,18): mod_base = OTHER; note = 2-prime deoxy-2-prime-F RNA nucleotides
  modified_base 1^2: mod_base = OTHER; note = Phosphorothioate
  modified_base 2^3: mod_base = OTHER; note = Phosphorothioate
  modified_base 17^18: mod_base = OTHER; note = Phosphorothioate
  modified_base 18^19: mod_base = OTHER; note = Phosphorothioate
  ncRNA 1..19: ncRNA_class = siRNA
gtcttcacaggcatttcta

SEQ ID NO: 631 - RNA, 19 nt, synthetic construct
  source 1..19: mol_type = other RNA
  modified_base order(1..6,10..19): mod_base = OTHER; note = 2-prime-O-Methyl RNA nucleotides
  modified_base 7..9: mod_base = OTHER; note = 2-prime deoxy-2-prime-F RNA nucleotides
  modified_base 1^2: mod_base = OTHER; note = Phosphorothioate
  modified_base 2^3: mod_base = OTHER; note = Phosphorothioate
  modified_base 17^18: mod_base = OTHER; note = Phosphorothioate
  modified_base 18^19: mod_base = OTHER; note = Phosphorothioate
  ncRNA 1..19: ncRNA_class = siRNA
tagaaatgcctgtgaagac

SEQ ID NO: 632 - RNA, 19 nt, synthetic construct
  source 1..19: mol_type = other RNA
  modified_base order(1,3,5,7,9,11,13,15,17,19): mod_base = OTHER; note = 2-prime-O-Methyl RNA nucleotides
  modified_base order(2,4,6,8,10,12,14,16,18): mod_base = OTHER; note = 2-prime deoxy-2-prime-F RNA nucleotides
  modified_base 1^2: mod_base = OTHER; note = Phosphorothioate
  modified_base 2^3: mod_base = OTHER; note = Phosphorothioate
  modified_base 17^18: mod_base = OTHER; note = Phosphorothioate
  modified_base 18^19: mod_base = OTHER; note = Phosphorothioate
  ncRNA 1..19: ncRNA_class = siRNA
tgaatcttgagaaagtcgt

SEQ ID NO: 633 - RNA, 19 nt, synthetic construct
  source 1..19: mol_type = other RNA
  modified_base order(1..6,10..19): mod_base = OTHER; note = 2-prime-O-Methyl RNA nucleotides
  modified_base 7..9: mod_base = OTHER; note = 2-prime deoxy-2-prime-F RNA nucleotides
  modified_base 1^2: mod_base = OTHER; note = Phosphorothioate
  modified_base 2^3: mod_base = OTHER; note = Phosphorothioate
  modified_base 17^18: mod_base = OTHER; note = Phosphorothioate
  modified_base 18^19: mod_base = OTHER; note = Phosphorothioate
  ncRNA 1..19: ncRNA_class = siRNA
acgactttctcaagattca

SEQ ID NO: 634 - RNA, 19 nt, synthetic construct
  source 1..19: mol_type = other RNA
  modified_base order(1,3,5,7,9,11,13,15,17,19): mod_base = OTHER; note = 2-prime-O-Methyl RNA nucleotides
  modified_base order(2,4,6,8,10,12,14,16,18): mod_base = OTHER; note = 2-prime deoxy-2-prime-F RNA nucleotides
  ncRNA 1..19: ncRNA_class = siRNA
  modified_base 1^2: mod_base = OTHER; note = Phosphorothioate
  modified_base 2^3: mod_base = OTHER; note = Phosphorothioate
  modified_base 17^18: mod_base = OTHER; note = Phosphorothioate
  modified_base 18^19: mod_base = OTHER; note = Phosphorothioate
tcggagcggaaggtaatgt

SEQ ID NO: 635 - RNA, 19 nt, synthetic construct
  source 1..19: mol_type = other RNA
  modified_base order(1..6,10..19): mod_base = OTHER; note = 2-prime-O-Methyl RNA nucleotides
  modified_base 7..9: mod_base = OTHER; note = 2-prime deoxy-2-prime-F RNA nucleotides
  modified_base 1^2: mod_base = OTHER; note = Phosphorothioate
  modified_base 2^3: mod_base = OTHER; note = Phosphorothioate
  modified_base 17^18: mod_base = OTHER; note = Phosphorothioate
  modified_base 18^19: mod_base = OTHER; note = Phosphorothioate
  ncRNA 1..19: ncRNA_class = siRNA
acattaccttccgctccga

SEQ ID NO: 636 - RNA, 19 nt, synthetic construct
  source 1..19: mol_type = other RNA
  modified_base order(1,3,5,7,9,11,13,15,17,19): mod_base = OTHER; note = 2-prime-O-Methyl RNA nucleotides
  modified_base order(2,4,6,8,10,12,14,16,18): mod_base = OTHER; note = 2-prime deoxy-2-prime-F RNA nucleotides
  modified_base 1^2: mod_base = OTHER; note = Phosphorothioate
  modified_base 2^3: mod_base = OTHER; note = Phosphorothioate
  modified_base 17^18: mod_base = OTHER; note = Phosphorothioate
  modified_base 18^19: mod_base = OTHER; note = Phosphorothioate
  ncRNA 1..19: ncRNA_class = siRNA
cacctggagtctgtttttt

SEQ ID NO: 637 - RNA, 19 nt, synthetic construct
  source 1..19: mol_type = other RNA
  modified_base order(1..6,10..19): mod_base = OTHER; note = 2-prime-O-Methyl RNA nucleotides
  modified_base 7..9: mod_base = OTHER; note = 2-prime deoxy-2-prime-F RNA nucleotides
  modified_base 1^2: mod_base = OTHER; note = Phosphorothioate
  modified_base 2^3: mod_base = OTHER; note = Phosphorothioate
  modified_base 17^18: mod_base = OTHER; note = Phosphorothioate
  modified_base 18^19: mod_base = OTHER; note = Phosphorothioate
  ncRNA 1..19: ncRNA_class = siRNA
aaaaaacagactccaggtg

SEQ ID NO: 638 - RNA, 19 nt, synthetic construct
  source 1..19: mol_type = other RNA
  modified_base order(1,3,5,7,9,11,13,15,17,19): mod_base = OTHER; note = 2-prime-O-Methyl RNA nucleotides
  modified_base order(2,4,6,8,10,12,14,16,18): mod_base = OTHER; note = 2-prime deoxy-2-prime-F RNA nucleotides
  modified_base 1^2: mod_base = OTHER; note = Phosphorothioate
  modified_base 2^3: mod_base = OTHER; note = Phosphorothioate
  modified_base 17^18: mod_base = OTHER; note = Phosphorothioate
  modified_base 18^19: mod_base = OTHER; note = Phosphorothioate
  ncRNA 1..19: ncRNA_class = siRNA
ttattcaatttaatcagtg

SEQ ID NO: 639 - RNA, 19 nt, synthetic construct
  source 1..19: mol_type = other RNA
  modified_base order(1..6,10..19): mod_base = OTHER; note = 2-prime-O-Methyl RNA nucleotides
  modified_base 7..9: mod_base = OTHER; note = 2-prime deoxy-2-prime-F RNA nucleotides
  modified_base 1^2: mod_base = OTHER; note = Phosphorothioate
  modified_base 2^3: mod_base = OTHER; note = Phosphorothioate
  modified_base 17^18: mod_base = OTHER; note = Phosphorothioate
  modified_base 18^19: mod_base = OTHER; note = Phosphorothioate
  ncRNA 1..19: ncRNA_class = siRNA
cactgattaaattgaataa

SEQ ID NO: 640 - RNA, 19 nt, synthetic construct
  source 1..19: mol_type = other RNA
  modified_base order(1,3,5,7,9,11,13,15,17,19): mod_base = OTHER; note = 2-prime-O-Methyl RNA nucleotides
  modified_base order(2,4,6,8,10,12,14,16,18): mod_base = OTHER; note = 2-prime deoxy-2-prime-F RNA nucleotides
  modified_base 1^2: mod_base = OTHER; note = Phosphorothioate
  modified_base 2^3: mod_base = OTHER; note = Phosphorothioate
  modified_base 17^18: mod_base = OTHER; note = Phosphorothioate
  modified_base 18^19: mod_base = OTHER; note = Phosphorothioate
  ncRNA 1..19: ncRNA_class = siRNA
aaaggattcagcttctttt

SEQ ID NO: 641 - RNA, 19 nt, synthetic construct
  source 1..19: mol_type = other RNA
  modified_base order(1..6,10..19): mod_base = OTHER; note = 2-prime-O-Methyl RNA nucleotides
  modified_base 7..9: mod_base = OTHER; note = 2-prime deoxy-2-prime-F RNA nucleotides
  modified_base 1^2: mod_base = OTHER; note = Phosphorothioate
  modified_base 2^3: mod_base = OTHER; note = Phosphorothioate
  modified_base 17^18: mod_base = OTHER; note = Phosphorothioate
  modified_base 18^19: mod_base = OTHER; note = Phosphorothioate
  ncRNA 1..19: ncRNA_class = siRNA
aaaagaagctgaatccttt

SEQ ID NO: 642 - RNA, 19 nt, synthetic construct
  source 1..19: mol_type = other RNA
  modified_base order(1,3,5,7,9,11,13,15,17,19): mod_base = OTHER; note = 2-prime-O-Methyl RNA nucleotides
  modified_base order(2,4,6,8,10,12,14,16,18): mod_base = OTHER; note = 2-prime deoxy-2-prime-F RNA nucleotides
  modified_base 1^2: mod_base = OTHER; note = Phosphorothioate
  modified_base 2^3: mod_base = OTHER; note = Phosphorothioate
  modified_base 17^18: mod_base = OTHER; note = Phosphorothioate
  modified_base 18^19: mod_base = OTHER; note = Phosphorothioate
  ncRNA 1..19: ncRNA_class = siRNA
gtagtcggagcggaaggta

SEQ ID NO: 643 - RNA, 19 nt, synthetic construct
  source 1..19: mol_type = other RNA
  modified_base order(1..6,10..19): mod_base = OTHER; note = 2-prime-O-Methyl RNA nucleotides
  modified_base 7..9: mod_base = OTHER; note = 2-prime deoxy-2-prime-F RNA nucleotides
  modified_base 1^2: mod_base = OTHER; note = Phosphorothioate
  modified_base 2^3: mod_base = OTHER; note = Phosphorothioate
  modified_base 17^18: mod_base = OTHER; note = Phosphorothioate
  modified_base 18^19: mod_base = OTHER; note = Phosphorothioate
  ncRNA 1..19: ncRNA_class = siRNA
taccttccgctccgactac

SEQ ID NO: 644 - RNA, 19 nt, synthetic construct
  source 1..19: mol_type = other RNA
  modified_base order(1,3,5,7,9,11,13,15,17,19): mod_base = OTHER; note = 2-prime-O-Methyl RNA nucleotides
  modified_base order(2,4,6,8,10,12,14,16,18): mod_base = OTHER; note = 2-prime deoxy-2-prime-F RNA nucleotides
  modified_base 1^2: mod_base = OTHER; note = Phosphorothioate
  modified_base 2^3: mod_base = OTHER; note = Phosphorothioate
  modified_base 17^18: mod_base = OTHER; note = Phosphorothioate
  modified_base 18^19: mod_base = OTHER; note = Phosphorothioate
  ncRNA 1..19: ncRNA_class = siRNA
agtcggagcggaaggtaat

SEQ ID NO: 645 - RNA, 19 nt, synthetic construct
  source 1..19: mol_type = other RNA
  modified_base order(1..6,10..19): mod_base = OTHER; note = 2-prime-O-Methyl RNA nucleotides
  modified_base 7..9: mod_base = OTHER; note = 2-prime deoxy-2-prime-F RNA nucleotides
  modified_base 1^2: mod_base = OTHER; note = Phosphorothioate
  modified_base 2^3: mod_base = OTHER; note = Phosphorothioate
  modified_base 17^18: mod_base = OTHER; note = Phosphorothioate
  modified_base 18^19: mod_base = OTHER; note = Phosphorothioate
  ncRNA 1..19: ncRNA_class = siRNA
attaccttccgctccgact

SEQ ID NO: 646 - RNA, 19 nt, synthetic construct
  source 1..19: mol_type = other RNA
  modified_base order(1,3,5,7,9,11,13,15,17,19): mod_base = OTHER; note = 2-prime-O-Methyl RNA nucleotides
  modified_base order(2,4,6,8,10,12,14,16,18): mod_base = OTHER; note = 2-prime deoxy-2-prime-F RNA nucleotides
  modified_base 1^2: mod_base = OTHER; note = Phosphorothioate
  modified_base 2^3: mod_base = OTHER; note = Phosphorothioate
  modified_base 17^18: mod_base = OTHER; note = Phosphorothioate
  modified_base 18^19: mod_base = OTHER; note = Phosphorothioate
  ncRNA 1..19: ncRNA_class = siRNA
catataaaagtgcacctgc

SEQ ID NO: 647 - RNA, 19 nt, synthetic construct
  source 1..19: mol_type = other RNA
  modified_base order(1..6,10..19): mod_base = OTHER; note = 2-prime-O-Methyl RNA nucleotides
  modified_base 7..9: mod_base = OTHER; note = 2-prime deoxy-2-prime-F RNA nucleotides
  modified_base 1^2: mod_base = OTHER; note = Phosphorothioate
  modified_base 2^3: mod_base = OTHER; note = Phosphorothioate
  modified_base 17^18: mod_base = OTHER; note = Phosphorothioate
  modified_base 18^19: mod_base = OTHER; note = Phosphorothioate
  ncRNA 1..19: ncRNA_class = siRNA
gcaggtgcacttttatatg

SEQ ID NO: 648 - RNA, 19 nt, synthetic construct
  source 1..19: mol_type = other RNA
  modified_base order(1,3,5,7,9,11,13,15,17,19): mod_base = OTHER; note = 2-prime-O-Methyl RNA nucleotides
  modified_base order(2,4,6,8,10,12,14,16,18): mod_base = OTHER; note = 2-prime deoxy-2-prime-F RNA nucleotides
  modified_base 1^2: mod_base = OTHER; note = Phosphorothioate
  modified_base 2^3: mod_base = OTHER; note = Phosphorothioate
  modified_base 17^18: mod_base = OTHER; note = Phosphorothioate
  modified_base 18^19: mod_base = OTHER; note = Phosphorothioate
  ncRNA 1..19: ncRNA_class = siRNA
catatatacgccctcctgt

SEQ ID NO: 649 - RNA, 19 nt, synthetic construct
  source 1..19: mol_type = other RNA
  modified_base order(1..6,10..19): mod_base = OTHER; note = 2-prime-O-Methyl RNA nucleotides
  modified_base 7..9: mod_base = OTHER; note = 2-prime deoxy-2-prime-F RNA nucleotides
  modified_base 1^2: mod_base = OTHER; note = Phosphorothioate
  modified_base 2^3: mod_base = OTHER; note = Phosphorothioate
  modified_base 17^18: mod_base = OTHER; note = Phosphorothioate
  modified_base 18^19: mod_base = OTHER; note = Phosphorothioate
  ncRNA 1..19: ncRNA_class = siRNA
acaggagggcgtatatatg

SEQ ID NO: 650 - RNA, 19 nt, synthetic construct
  source 1..19: mol_type = other RNA
  modified_base order(1,3,5,7,9,11,13,15,17,19): mod_base = OTHER; note = 2-prime-O-Methyl RNA nucleotides
  modified_base order(2,4,6,8,10,12,14,16,18): mod_base = OTHER; note = 2-prime deoxy-2-prime-F RNA nucleotides
  modified_base 1^2: mod_base = OTHER; note = Phosphorothioate
  modified_base 2^3: mod_base = OTHER; note = Phosphorothioate
  modified_base 17^18: mod_base = OTHER; note = Phosphorothioate
  modified_base 18^19: mod_base = OTHER; note = Phosphorothioate
  ncRNA 1..19: ncRNA_class = siRNA
tccatatatacgccctcct

SEQ ID NO: 651 - RNA, 19 nt, synthetic construct
  source 1..19: mol_type = other RNA
  modified_base order(1..6,10..19): mod_base = OTHER; note = 2-prime-O-Methyl RNA nucleotides
  modified_base 7..9: mod_base = OTHER; note = 2-prime deoxy-2-prime-F RNA nucleotides
  modified_base 1^2: mod_base = OTHER; note = Phosphorothioate
  modified_base 2^3: mod_base = OTHER; note = Phosphorothioate
  modified_base 17^18: mod_base = OTHER; note = Phosphorothioate
  modified_base 18^19: mod_base = OTHER; note = Phosphorothioate
  ncRNA 1..19: ncRNA_class = siRNA
aggagggcgtatatatgga

SEQ ID NO: 652 - RNA, 19 nt, synthetic construct
  source 1..19: mol_type = other RNA
  modified_base order(1,3,5,7,9,11,13,15,17,19): mod_base = OTHER; note = 2-prime-O-Methyl RNA nucleotides
  modified_base order(2,4,6,8,10,12,14,16,18): mod_base = OTHER; note = 2-prime deoxy-2-prime-F RNA nucleotides
  modified_base 1^2: mod_base = OTHER; note = Phosphorothioate
  modified_base 2^3: mod_base = OTHER; note = Phosphorothioate
  modified_base 17^18: mod_base = OTHER; note = Phosphorothioate
  modified_base 18^19: mod_base = OTHER; note = Phosphorothioate
  ncRNA 1..19: ncRNA_class = siRNA
tattgattacaactttgtt

SEQ ID NO: 653 - RNA, 19 nt, synthetic construct
  source 1..19: mol_type = other RNA
  modified_base order(1..6,10..19): mod_base = OTHER; note = 2-prime-O-Methyl RNA nucleotides
  modified_base 7..9: mod_base = OTHER; note = 2-prime deoxy-2-prime-F RNA nucleotides
  modified_base 1^2: mod_base = OTHER; note = Phosphorothioate
  modified_base 2^3: mod_base = OTHER; note = Phosphorothioate
  modified_base 17^18: mod_base = OTHER; note = Phosphorothioate
  modified_base 18^19: mod_base = OTHER; note = Phosphorothioate
  ncRNA 1..19: ncRNA_class = siRNA
aacaaagttgtaatcaata

SEQ ID NO: 654 - RNA, 19 nt, synthetic construct
  source 1..19: mol_type = other RNA
  modified_base order(1,3,5,7,9,11,13,15,17,19): mod_base = OTHER; note = 2-prime-O-Methyl RNA nucleotides
  modified_base order(2,4,6,8,10,12,14,16,18): mod_base = OTHER; note = 2-prime deoxy-2-prime-F RNA nucleotides
  modified_base 1^2: mod_base = OTHER; note = Phosphorothioate
  modified_base 2^3: mod_base = OTHER; note = Phosphorothioate
  modified_base 17^18: mod_base = OTHER; note = Phosphorothioate
  modified_base 18^19: mod_base = OTHER; note = Phosphorothioate
  ncRNA 1..19: ncRNA_class = siRNA
tacaactttgttattcaat

SEQ ID NO: 655 - RNA, 19 nt, synthetic construct
  source 1..19: mol_type = other RNA
  modified_base order(1..6,10..19): mod_base = OTHER; note = 2-prime-O-Methyl RNA nucleotides
  modified_base 7..9: mod_base = OTHER; note = 2-prime deoxy-2-prime-F RNA nucleotides
  modified_base 1^2: mod_base = OTHER; note = Phosphorothioate
  modified_base 2^3: mod_base = OTHER; note = Phosphorothioate
  modified_base 17^18: mod_base = OTHER; note = Phosphorothioate
  modified_base 18^19: mod_base = OTHER; note = Phosphorothioate
  ncRNA 1..19: ncRNA_class = siRNA
attgaataacaaagttgta

SEQ ID NO: 656 - RNA, 19 nt, synthetic construct
  source 1..19: mol_type = other RNA
  modified_base order(1,3,5,7,9,11,13,15,17,19): mod_base = OTHER; note = 2-prime-O-Methyl RNA nucleotides
  modified_base order(2,4,6,8,10,12,14,16,18): mod_base = OTHER; note = 2-prime deoxy-2-prime-F RNA nucleotides
  modified_base 1^2: mod_base = OTHER; note = Phosphorothioate
  modified_base 2^3: mod_base = OTHER; note = Phosphorothioate
  modified_base 17^18: mod_base = OTHER; note = Phosphorothioate
  modified_base 18^19: mod_base = OTHER; note = Phosphorothioate
  ncRNA 1..19: ncRNA_class = siRNA
ttgccttttgccctccata

SEQ ID NO: 657 - RNA, 19 nt, synthetic construct
  source 1..19: mol_type = other RNA
  modified_base order(1..6,10..19): mod_base = OTHER; note = 2-prime-O-Methyl RNA nucleotides
  modified_base 7..9: mod_base = OTHER; note = 2-prime deoxy-2-prime-F RNA nucleotides
  modified_base 1^2: mod_base = OTHER; note = Phosphorothioate
  modified_base 2^3: mod_base = OTHER; note = Phosphorothioate
  modified_base 17^18: mod_base = OTHER; note = Phosphorothioate
  modified_base 18^19: mod_base = OTHER; note = Phosphorothioate
  ncRNA 1..19: ncRNA_class = siRNA
tatggagggcaaaaggcaa

SEQ ID NO: 658 - RNA, 19 nt, synthetic construct
  source 1..19: mol_type = other RNA
  modified_base order(1,3,5,7,9,11,13,15,17,19): mod_base = OTHER; note = 2-prime-O-Methyl RNA nucleotides
  modified_base order(2,4,6,8,10,12,14,16,18): mod_base = OTHER; note = 2-prime deoxy-2-prime-F RNA nucleotides
  modified_base 1^2: mod_base = OTHER; note = Phosphorothioate
  modified_base 2^3: mod_base = OTHER; note = Phosphorothioate
  modified_base 17^18: mod_base = OTHER; note = Phosphorothioate
  modified_base 18^19: mod_base = OTHER; note = Phosphorothioate
  ncRNA 1..19: ncRNA_class = siRNA
taatatcaggacttgccaa

SEQ ID NO: 659 - RNA, 19 nt, synthetic construct
  source 1..19: mol_type = other RNA
  modified_base order(1..6,10..19): mod_base = OTHER; note = 2-prime-O-Methyl RNA nucleotides
  modified_base 7..9: mod_base = OTHER; note = 2-prime deoxy-2-prime-F RNA nucleotides
  modified_base 1^2: mod_base = OTHER; note = Phosphorothioate
  modified_base 2^3: mod_base = OTHER; note = Phosphorothioate
  modified_base 17^18: mod_base = OTHER; note = Phosphorothioate
  modified_base 18^19: mod_base = OTHER; note = Phosphorothioate
  ncRNA 1..19: ncRNA_class = siRNA
ttggcaagtcctgatatta

SEQ ID NO: 660 - RNA, 19 nt, synthetic construct
  source 1..19: mol_type = other RNA
  modified_base order(1,3,5,7,9,11,13,15,17,19): mod_base = OTHER; note = 2-prime-O-Methyl RNA nucleotides
  modified_base order(2,4,6,8,10,12,14,16,18): mod_base = OTHER; note = 2-prime deoxy-2-prime-F RNA nucleotides
  modified_base 1^2: mod_base = OTHER; note = Phosphorothioate
  modified_base 2^3: mod_base = OTHER; note = Phosphorothioate
  modified_base 17^18: mod_base = OTHER; note = Phosphorothioate
  modified_base 18^19: mod_base = OTHER; note = Phosphorothioate
  ncRNA 1..19: ncRNA_class = siRNA
tcgtagggacacagggttt

SEQ ID NO: 661 - RNA, 19 nt, synthetic construct
  source 1..19: mol_type = other RNA
  modified_base order(1..6,10..19): mod_base = OTHER; note = 2-prime-O-Methyl RNA nucleotides
  modified_base 7..9: mod_base = OTHER; note = 2-prime deoxy-2-prime-F RNA nucleotides
  modified_base 1^2: mod_base = OTHER; note = Phosphorothioate
  modified_base 2^3: mod_base = OTHER; note = Phosphorothioate
  modified_base 17^18: mod_base = OTHER; note = Phosphorothioate
  modified_base 18^19: mod_base = OTHER; note = Phosphorothioate
  ncRNA 1..19: ncRNA_class = siRNA
aaaccctgtgtccctacga

SEQ ID NO: 662 - RNA, 19 nt, synthetic construct
  source 1..19: mol_type = other RNA
  modified_base order(1,3,5,7,9,11,13,15,17,19): mod_base = OTHER; note = 2-prime-O-Methyl RNA nucleotides
  modified_base order(2,4,6,8,10,12,14,16,18): mod_base = OTHER; note = 2-prime deoxy-2-prime-F RNA nucleotides
  modified_base 1^2: mod_base = OTHER; note = Phosphorothioate
  modified_base 2^3: mod_base = OTHER; note = Phosphorothioate
  modified_base 17^18: mod_base = OTHER; note = Phosphorothioate
  modified_base 18^19: mod_base = OTHER; note = Phosphorothioate
  ncRNA 1..19: ncRNA_class = siRNA
tcgtcaatgtcctcggctg

SEQ ID NO: 663 - RNA, 19 nt, synthetic construct
  source 1..19: mol_type = other RNA
  modified_base order(1..6,10..19): mod_base = OTHER; note = 2-prime-O-Methyl RNA nucleotides
  modified_base 7..9: mod_base = OTHER; note = 2-prime deoxy-2-prime-F RNA nucleotides
  modified_base 1^2: mod_base = OTHER; note = Phosphorothioate
  modified_base 2^3: mod_base = OTHER; note = Phosphorothioate
  modified_base 17^18: mod_base = OTHER; note = Phosphorothioate
  modified_base 18^19: mod_base = OTHER; note = Phosphorothioate
  ncRNA 1..19: ncRNA_class = siRNA
cagccgaggacattgacga

SEQ ID NO: 664 - RNA, 19 nt, synthetic construct
  source 1..19: mol_type = other RNA
  modified_base order(1,3,5,7,9,11,13,15,17,19): mod_base = OTHER; note = 2-prime-O-Methyl RNA nucleotides
  modified_base order(2,4,6,8,10,12,14,16,18): mod_base = OTHER; note = 2-prime deoxy-2-prime-F RNA nucleotides
  modified_base 1^2: mod_base = OTHER; note = Phosphorothioate
  modified_base 2^3: mod_base = OTHER; note = Phosphorothioate
  modified_base 17^18: mod_base = OTHER; note = Phosphorothioate
  modified_base 18^19: mod_base = OTHER; note = Phosphorothioate
  ncRNA 1..19: ncRNA_class = siRNA
ccctccatatatacgccct

SEQ ID NO: 665 - RNA, 19 nt, synthetic construct
  source 1..19: mol_type = other RNA
  modified_base order(1..6,10..19): mod_base = OTHER; note = 2-prime-O-Methyl RNA nucleotides
  modified_base 7..9: mod_base = OTHER; note = 2-prime deoxy-2-prime-F RNA nucleotides
  modified_base 1^2: mod_base = OTHER; note = Phosphorothioate
  modified_base 17^18: mod_base = OTHER; note = Phosphorothioate
  modified_base 2^3: mod_base = OTHER; note = Phosphorothioate
  modified_base 18^19: mod_base = OTHER; note = Phosphorothioate
  ncRNA 1..19: ncRNA_class = siRNA
agggcgtatatatggaggg

SEQ ID NO: 666 - RNA, 19 nt, synthetic construct
  source 1..19: mol_type = other RNA
  modified_base order(1,3,5,7,9,11,13,15,17,19): mod_base = OTHER; note = 2-prime-O-Methyl RNA nucleotides
  modified_base order(2,4,6,8,10,12,14,16,18): mod_base = OTHER; note = 2-prime deoxy-2-prime-F RNA nucleotides
  modified_base 1^2: mod_base = OTHER; note = Phosphorothioate
  modified_base 2^3: mod_base = OTHER; note = Phosphorothioate
  modified_base 17^18: mod_base = OTHER; note = Phosphorothioate
  modified_base 18^19: mod_base = OTHER; note = Phosphorothioate
  ncRNA 1..19: ncRNA_class = siRNA
tccagaatgacactgaacc

SEQ ID NO: 667 - RNA, 19 nt, synthetic construct
  source 1..19: mol_type = other RNA
  modified_base order(1..6,10..19): mod_base = OTHER; note = 2-prime-O-Methyl RNA nucleotides
  modified_base 7..9: mod_base = OTHER; note = 2-prime deoxy-2-prime-F RNA nucleotides
  modified_base 1^2: mod_base = OTHER; note = Phosphorothioate
  modified_base 2^3: mod_base = OTHER; note = Phosphorothioate
  modified_base 17^18: mod_base = OTHER; note = Phosphorothioate
  modified_base 18^19: mod_base = OTHER; note = Phosphorothioate
  ncRNA 1..19: ncRNA_class = siRNA
ggttcagtgtcattctgga

SEQ ID NO: 668 - RNA, 19 nt, synthetic construct
  source 1..19: mol_type = other RNA
  modified_base order(1,3,5,7,9,11,13,15,17,19): mod_base = OTHER; note = 2-prime-O-Methyl RNA nucleotides
  modified_base order(2,4,6,8,10,12,14,16,18): mod_base = OTHER; note = 2-prime deoxy-2-prime-F RNA nucleotides
  modified_base 1^2: mod_base = OTHER; note = Phosphorothioate
  modified_base 2^3: mod_base = OTHER; note = Phosphorothioate
  modified_base 17^18: mod_base = OTHER; note = Phosphorothioate
  modified_base 18^19: mod_base = OTHER; note = Phosphorothioate
  ncRNA 1..19: ncRNA_class = siRNA
aaagccagcatcatgagta

SEQ ID NO: 669 - RNA, 19 nt, synthetic construct
  source 1..19: mol_type = other RNA
  modified_base order(1..6,10..19): mod_base = OTHER; note = 2-prime-O-Methyl RNA nucleotides
  modified_base 7..9: mod_base = OTHER; note = 2-prime deoxy-2-prime-F RNA nucleotides
  modified_base 1^2: mod_base = OTHER; note = Phosphorothioate
  modified_base 2^3: mod_base = OTHER; note = Phosphorothioate
  modified_base 17^18: mod_base = OTHER; note = Phosphorothioate
  modified_base 18^19: mod_base = OTHER; note = Phosphorothioate
  ncRNA 1..19: ncRNA_class = siRNA
tactcatgatgctggcttt

SEQ ID NO: 670 - RNA, 19 nt, synthetic construct
  source 1..19: mol_type = other RNA
  modified_base order(1,3,5,7,9,11,13,15,17,19): mod_base = OTHER; note = Phosphorothioate
  modified_base order(2,4,6,8,10,12,14,16,18): mod_base = OTHER; note = 2-prime deoxy-2-prime-F RNA nucleotides
  modified_base 1^2: mod_base = OTHER; note = Phosphorothioate
  modified_base 2^3: mod_base = OTHER; note = Phosphorothioate
  modified_base 17^18: mod_base = OTHER; note = Phosphorothioate
  modified_base 18^19: mod_base = OTHER; note = Phosphorothioate
  ncRNA 1..19: ncRNA_class = siRNA
atatacgccctcctgttgt

SEQ ID NO: 671 - RNA, 19 nt, synthetic construct
  source 1..19: mol_type = other RNA
  modified_base order(1..6,10..19): mod_base = OTHER; note = 2-prime-O-Methyl RNA nucleotides
  modified_base 7..9: mod_base = OTHER; note = 2-prime deoxy-2-prime-F RNA nucleotides
  modified_base 1^2: mod_base = OTHER; note = Phosphorothioate
  modified_base 2^3: mod_base = OTHER; note = Phosphorothioate
  modified_base 17^18: mod_base = OTHER; note = Phosphorothioate
  modified_base 18^19: mod_base = OTHER; note = Phosphorothioate
  ncRNA 1..19: ncRNA_class = siRNA
acaacaggagggcgtatat

SEQ ID NO: 672 - RNA, 19 nt, synthetic construct
  source 1..19: mol_type = other RNA
  modified_base order(1,3,5,7,9,11,13,15,17,19): mod_base = OTHER; note = 2-prime-O-Methyl RNA nucleotides
  modified_base order(2,4,6,8,10,12,14,16,18): mod_base = OTHER; note = 2-prime deoxy-2-prime-F RNA nucleotides
  modified_base 1^2: mod_base = OTHER; note = Phosphorothioate
  modified_base 2^3: mod_base = OTHER; note = Phosphorothioate
  modified_base 17^18: mod_base = OTHER; note = Phosphorothioate
  modified_base 18^19: mod_base = OTHER; note = Phosphorothioate
  ncRNA 1..19: ncRNA_class = siRNA
tatgtcattgtcaaagcca

SEQ ID NO: 673 - RNA, 19 nt, synthetic construct
  source 1..19: mol_type = other RNA
  modified_base order(1..6,10..19): mod_base = OTHER; note = 2-prime-O-Methyl RNA nucleotides
  modified_base 7..9: mod_base = OTHER; note = 2-prime deoxy-2-prime-F RNA nucleotides
  modified_base 1^2: mod_base = OTHER; note = Phosphorothioate
  modified_base 2^3: mod_base = OTHER; note = Phosphorothioate
  modified_base 17^18: mod_base = OTHER; note = Phosphorothioate
  modified_base 18^19: mod_base = OTHER; note = Phosphorothioate
  ncRNA 1..19: ncRNA_class = siRNA
tggctttgacaatgacata

SEQ ID NO: 674 - RNA, 19 nt, synthetic construct
  source 1..19: mol_type = other RNA
  modified_base order(1,3,5,7,9,11,13,15,17,19): mod_base = OTHER; note = 2-prime-O-Methyl RNA nucleotides
  modified_base order(2,4,6,8,10,12,14,16,18): mod_base = OTHER; note = 2-prime deoxy-2-prime-F RNA nucleotides
  modified_base 1^2: mod_base = OTHER; note = Phosphorothioate
  modified_base 2^3: mod_base = OTHER; note = Phosphorothioate
  modified_base 17^18: mod_base = OTHER; note = Phosphorothioate
  modified_base 18^19: mod_base = OTHER; note = Phosphorothioate
  ncRNA 1..19: ncRNA_class = siRNA
atactcccctggaaagccg

SEQ ID NO: 675 - RNA, 19 nt, synthetic construct
  source 1..19: mol_type = other RNA
  modified_base order(1..6,10..19): mod_base = OTHER; note = 2-prime-O-Methyl RNA nucleotides
  modified_base 7..9: mod_base = OTHER; note = 2-prime deoxy-2-prime-F RNA nucleotides
  modified_base 1^2: mod_base = OTHER; note = Phosphorothioate
  modified_base 2^3: mod_base = OTHER; note = Phosphorothioate
  modified_base 17^18: mod_base = OTHER; note = Phosphorothioate
  modified_base 18^19: mod_base = OTHER; note = Phosphorothioate
  ncRNA 1..19: ncRNA_class = siRNA
cggctttccaggggagtat

SEQ ID NO: 676 - RNA, 19 nt, synthetic construct
  source 1..19: mol_type = other RNA
  modified_base order(1,3,5,7,9,11,13,15,17,19): mod_base = OTHER; note = 2-prime-O-Methyl RNA nucleotides
  modified_base order(2,4,6,8,10,12,14,16,18): mod_base = OTHER; note = 2-prime deoxy-2-prime-F RNA nucleotides
  modified_base 1^2: mod_base = OTHER; note = Phosphorothioate
  modified_base 2^3: mod_base = OTHER; note = Phosphorothioate
  modified_base 17^18: mod_base = OTHER; note = Phosphorothioate
  modified_base 18^19: mod_base = OTHER; note = Phosphorothioate
  ncRNA 1..19: ncRNA_class = siRNA
atcatgagtataaccttca

SEQ ID NO: 677 - RNA, 19 nt, synthetic construct
  source 1..19: mol_type = other RNA
  modified_base order(1..6,10..19): mod_base = OTHER; note = 2-prime-O-Methyl RNA nucleotides
  modified_base 7..9: mod_base = OTHER; note = 2-prime deoxy-2-prime-F RNA nucleotides
  modified_base 1^2: mod_base = OTHER; note = Phosphorothioate
  modified_base 2^3: mod_base = OTHER; note = Phosphorothioate
  modified_base 17^18: mod_base = OTHER; note = Phosphorothioate
  modified_base 18^19: mod_base = OTHER; note = Phosphorothioate
  ncRNA 1..19: ncRNA_class = siRNA
tgaaggttatactcatgat

SEQ ID NO: 678 - RNA, 19 nt, synthetic construct
  source 1..19: mol_type = other RNA
  modified_base order(1,3,5,7,9,11,13,15,17,19): mod_base = OTHER; note = 2-prime-O-Methyl RNA nucleotides
  modified_base order(2,4,6,8,10,12,14,16,18): mod_base = OTHER; note = 2-prime deoxy-2-prime-F RNA nucleotides
  modified_base 1^2: mod_base = OTHER; note = Phosphorothioate
  modified_base 2^3: mod_base = OTHER; note = Phosphorothioate
  modified_base 17^18: mod_base = OTHER; note = Phosphorothioate
  modified_base 18^19: mod_base = OTHER; note = Phosphorothioate
  ncRNA 1..19: ncRNA_class = siRNA
tggcagacaaataggcgtg

SEQ ID NO: 679 - RNA, 19 nt, synthetic construct
  source 1..19: mol_type = other RNA
  modified_base order(1..6,10..19): mod_base = OTHER; note = 2-prime-O-Methyl RNA nucleotides
  modified_base 7..9: mod_base = OTHER; note = 2-prime deoxy-2-prime-F RNA nucleotides
  modified_base 1^2: mod_base = OTHER; note = Phosphorothioate
  modified_base 2^3: mod_base = OTHER; note = Phosphorothioate
  modified_base 17^18: mod_base = OTHER; note = Phosphorothioate
  modified_base 18^19: mod_base = OTHER; note = Phosphorothioate
  ncRNA 1..19: ncRNA_class = siRNA
cacgcctatttgtctgcca

SEQ ID NO: 680 - RNA, 19 nt, synthetic construct
  source 1..19: mol_type = other RNA
  modified_base order(1,3,5,7,9,11,13,15,17,19): mod_base = OTHER; note = 2-prime-O-Methyl RNA nucleotides
  modified_base order(2,4,6,8,10,12,14,16,18): mod_base = OTHER; note = 2-prime deoxy-2-prime-F RNA nucleotides
  modified_base 1^2: mod_base = OTHER; note = Phosphorothioate
  modified_base 2^3: mod_base = OTHER; note = Phosphorothioate
  modified_base 17^18: mod_base = OTHER; note = Phosphorothioate
  modified_base 18^19: mod_base = OTHER; note = Phosphorothioate
  ncRNA 1..19: ncRNA_class = siRNA
tctttcaggatgtatttgg

SEQ ID NO: 681 - RNA, 19 nt, synthetic construct
  source 1..19: mol_type = other RNA
  modified_base order(1..6,10..19): mod_base = OTHER; note = 2-prime-O-Methyl RNA nucleotides
  modified_base 7..9: mod_base = OTHER; note = 2-prime deoxy-2-prime-F RNA nucleotides
  modified_base 1^2: mod_base = OTHER; note = Phosphorothioate
  modified_base 2^3: mod_base = OTHER; note = Phosphorothioate
  modified_base 17^18: mod_base = OTHER; note = Phosphorothioate
  modified_base 18^19: mod_base = OTHER; note = Phosphorothioate
  ncRNA 1..19: ncRNA_class = siRNA
ccaaatacatcctgaaaga

SEQ ID NO: 682 - RNA, 19 nt, synthetic construct
  source 1..19: mol_type = other RNA
  modified_base order(1,3,5,7,9,11,13,15,17,19): mod_base = OTHER; note = 2-prime-O-Methyl RNA nucleotides
  modified_base order(2,4,6,8,10,12,14,16,18): mod_base = OTHER; note = 2-prime deoxy-2-prime-F RNA nucleotides
  modified_base 1^2: mod_base = OTHER; note = Phosphorothioate
  modified_base 2^3: mod_base = OTHER; note = Phosphorothioate
  modified_base 17^18: mod_base = OTHER; note = Phosphorothioate
  modified_base 18^19: mod_base = OTHER; note = Phosphorothioate
  ncRNA 1..19: ncRNA_class = siRNA
ttgaatcttgagaaagtcg

SEQ ID NO: 683 - RNA, 19 nt, synthetic construct
  source 1..19: mol_type = other RNA
  modified_base order(1..6,10..19): mod_base = OTHER; note = 2-prime-O-Methyl RNA nucleotides
  modified_base 7..9: mod_base = OTHER; note = 2-prime deoxy-2-prime-F RNA nucleotides
  modified_base 1^2: mod_base = OTHER; note = Phosphorothioate
  modified_base 2^3: mod_base = OTHER; note = Phosphorothioate
  modified_base 17^18: mod_base = OTHER; note = Phosphorothioate
  modified_base 18^19: mod_base = OTHER; note = Phosphorothioate
  ncRNA 1..19: ncRNA_class = siRNA
cgactttctcaagattcaa

SEQ ID NO: 684 - RNA, 19 nt, synthetic construct
  source 1..19: mol_type = other RNA
  modified_base order(1,3,5,7,9,11,13,15,17,19): mod_base = OTHER; note = 2-prime-O-Methyl RNA nucleotides
  modified_base order(2,4,6,8,10,12,14,16,18): mod_base = OTHER; note = 2-prime deoxy-2-prime-F RNA nucleotides
  modified_base 1^2: mod_base = OTHER; note = Phosphorothioate
  modified_base 2^3: mod_base = OTHER; note = Phosphorothioate
  modified_base 17^18: mod_base = OTHER; note = Phosphorothioate
  modified_base 18^19: mod_base = OTHER; note = Phosphorothioate
  ncRNA 1..19: ncRNA_class = siRNA
cttgcccccactttctaag

SEQ ID NO: 685 - RNA, 19 nt, synthetic construct
  source 1..19: mol_type = other RNA
  modified_base order(1..6,10..19): mod_base = OTHER; note = 2-prime-O-Methyl RNA nucleotides
  modified_base 7..9: mod_base = OTHER; note = 2-prime deoxy-2-prime-F RNA nucleotides
  modified_base 1^2: mod_base = OTHER; note = Phosphorothioate
  modified_base 2^3: mod_base = OTHER; note = Phosphorothioate
  modified_base 17^18: mod_base = OTHER; note = Phosphorothioate
  modified_base 18^19: mod_base = OTHER; note = Phosphorothioate
  ncRNA 1..19: ncRNA_class = siRNA
cttagaaagtgggggcaag

SEQ ID NO: 686 - RNA, 19 nt, synthetic construct
  source 1..19: mol_type = other RNA
  modified_base order(1,3,5,7,9,11,13,15,17,19): mod_base = OTHER; note = 2-prime-O-Methyl RNA nucleotides
  modified_base order(2,4,6,8,10,12,14,16,18): mod_base = OTHER; note = 2-prime deoxy-2-prime-F RNA nucleotides
  modified_base 1^2: mod_base = OTHER; note = Phosphorothioate
  modified_base 2^3: mod_base = OTHER; note = Phosphorothioate
  modified_base 17^18: mod_base = OTHER; note = Phosphorothioate
  modified_base 18^19: mod_base = OTHER; note = Phosphorothioate
  ncRNA 1..19: ncRNA_class = siRNA
agttccaatgtcatctgtc

SEQ ID NO: 687 - RNA, 19 nt, synthetic construct
  source 1..19: mol_type = other RNA
  modified_base order(1..6,10..19): mod_base = OTHER; note = 2-prime-O-Methyl RNA nucleotides
  modified_base 7..9: mod_base = OTHER; note = 2-prime deoxy-2-prime-F RNA nucleotides
  modified_base 1^2: mod_base = OTHER; note = Phosphorothioate
  modified_base 2^3: mod_base = OTHER; note = Phosphorothioate
  modified_base 17^18: mod_base = OTHER; note = Phosphorothioate
  modified_base 18^19: mod_base = OTHER; note = Phosphorothioate
  ncRNA 1..19: ncRNA_class = siRNA
gacagatgacattggaact

SEQ ID NO: 688 - RNA, 19 nt, synthetic construct
  source 1..19: mol_type = other RNA
  modified_base order(1,3,5,7,9,11,13,15,17,19): mod_base = OTHER; note = 2-prime-O-Methyl RNA nucleotides
  modified_base order(2,4,6,8,10,12,14,16,18): mod_base = OTHER; note = 2-prime deoxy-2-prime-F RNA nucleotides
  modified_base 1^2: mod_base = OTHER; note = Phosphorothioate
  modified_base 2^3: mod_base = OTHER; note = Phosphorothioate
  modified_base 17^18: mod_base = OTHER; note = Phosphorothioate
  modified_base 18^19: mod_base = OTHER; note = Phosphorothioate
  ncRNA 1..19: ncRNA_class = siRNA
cttgagaaagtcgtaggga

SEQ ID NO: 689 - RNA, 19 nt, synthetic construct
  source 1..19: mol_type = other RNA
  modified_base order(1..6,10..19): mod_base = OTHER; note = 2-prime-O-Methyl RNA nucleotides
  modified_base 7..9: mod_base = OTHER; note = 2-prime deoxy-2-prime-F RNA nucleotides
  modified_base 1^2: mod_base = OTHER; note = Phosphorothioate
  modified_base 2^3: mod_base = OTHER; note = Phosphorothioate
  modified_base 17^18: mod_base = OTHER; note = Phosphorothioate
  modified_base 18^19: mod_base = OTHER; note = Phosphorothioate
  ncRNA 1..19: ncRNA_class = siRNA
tccctacgactttctcaag

SEQ ID NO: 690 - RNA, 19 nt, synthetic construct
  source 1..19: mol_type = other RNA
  modified_base order(1,3,5,7,9,11,13,15,17,19): mod_base = OTHER; note = 2-prime-O-Methyl RNA nucleotides
  modified_base order(2,4,6,8,10,12,14,16,18): mod_base = OTHER; note = 2-prime deoxy-2-prime-F RNA nucleotides
  modified_base 1^2: mod_base = OTHER; note = Phosphorothioate
  modified_base 2^3: mod_base = OTHER; note = Phosphorothioate
  modified_base 17^18: mod_base = OTHER; note = Phosphorothioate
  modified_base 18^19: mod_base = OTHER; note = Phosphorothioate
  ncRNA 1..19: ncRNA_class = siRNA
tttcattgtgtagaaggtc

SEQ ID NO: 691 - RNA, 19 nt, synthetic construct
  source 1..19: mol_type = other RNA
  modified_base order(1..6,10..19): mod_base = OTHER; note = 2-prime-O-Methyl RNA nucleotides
  modified_base 7..9: mod_base = OTHER; note = 2-prime deoxy-2-prime-F RNA nucleotides
  modified_base 1^2: mod_base = OTHER; note = Phosphorothioate
  modified_base 2^3: mod_base = OTHER; note = Phosphorothioate
  modified_base 17^18: mod_base = OTHER; note = Phosphorothioate
  modified_base 18^19: mod_base = OTHER; note = Phosphorothioate
  ncRNA 1..19: ncRNA_class = siRNA
gaccttctacacaatgaaa

SEQ ID NO: 692 - RNA, 19 nt, synthetic construct
  source 1..19: mol_type = other RNA
  modified_base order(1,3,5,7,9,11,13,15,17,19): mod_base = OTHER; note = 2-prime-O-Methyl RNA nucleotides
  modified_base order(2,4,6,8,10,12,14,16,18): mod_base = OTHER; note = 2-prime deoxy-2-prime-F RNA nucleotides
  modified_base 1^2: mod_base = OTHER; note = Phosphorothioate
  modified_base 2^3: mod_base = OTHER; note = Phosphorothioate
  modified_base 17^18: mod_base = OTHER; note = Phosphorothioate
  modified_base 18^19: mod_base = OTHER; note = Phosphorothioate
  ncRNA 1..19: ncRNA_class = siRNA
gccagtatgaaaagagact

SEQ ID NO: 693 - RNA, 19 nt, synthetic construct
  source 1..19: mol_type = other RNA
  modified_base order(1..6,10..19): mod_base = OTHER; note = 2-prime-O-Methyl RNA nucleotides
  modified_base 7..9: mod_base = OTHER; note = 2-prime deoxy-2-prime-F RNA nucleotides
  modified_base 1^2: mod_base = OTHER; note = Phosphorothioate
  modified_base 2^3: mod_base = OTHER; note = Phosphorothioate
  modified_base 17^18: mod_base = OTHER; note = Phosphorothioate
  modified_base 18^19: mod_base = OTHER; note = Phosphorothioate
  ncRNA 1..19: ncRNA_class = siRNA
agtctcttttcatactggc

SEQ ID NO: 694 - RNA, 19 nt, synthetic construct
  source 1..19: mol_type = other RNA
  modified_base order(1,3,5,7,9,11,13,15,17,19): mod_base = OTHER; note = 2-prime-O-Methyl RNA nucleotides
  modified_base order(2,4,6,8,10,12,14,16,18): mod_base = OTHER; note = 2-prime deoxy-2-prime-F RNA nucleotides
  modified_base 1^2: mod_base = OTHER; note = Phosphorothioate
  modified_base 2^3: mod_base = OTHER; note = Phosphorothioate
  modified_base 17^18: mod_base = OTHER; note = Phosphorothioate
  modified_base 18^19: mod_base = OTHER; note = Phosphorothioate
  ncRNA 1..19: ncRNA_class = siRNA
agcttgacgaagtcgtact

SEQ ID NO: 695 - RNA, 19 nt, synthetic construct
  source 1..19: mol_type = other RNA
  modified_base order(1..6,10..19): mod_base = OTHER; note = 2-prime-O-Methyl RNA nucleotides
  modified_base 7..9: mod_base = OTHER; note = 2-prime deoxy-2-prime-F RNA nucleotides
  modified_base 1^2: mod_base = OTHER; note = Phosphorothioate
  modified_base 2^3: mod_base = OTHER; note = Phosphorothioate
  modified_base 17^18: mod_base = OTHER; note = Phosphorothioate
  modified_base 18^19: mod_base = OTHER; note = Phosphorothioate
  ncRNA 1..19: ncRNA_class = siRNA
agtacgacttcgtcaagct

SEQ ID NO: 696 - RNA, 19 nt, synthetic construct
  source 1..19: mol_type = other RNA
  modified_base order(1,3,5,7,9,11,13,15,17,19): mod_base = OTHER; note = 2-prime-O-Methyl RNA nucleotides
  modified_base order(2,4,6,8,10,12,14,16,18): mod_base = OTHER; note = 2-prime deoxy-2-prime-F RNA nucleotides
  modified_base 1^2: mod_base = OTHER; note = Phosphorothioate
  modified_base 2^3: mod_base = OTHER; note = Phosphorothioate
  modified_base 17^18: mod_base = OTHER; note = Phosphorothioate
  modified_base 18^19: mod_base = OTHER; note = Phosphorothioate
  ncRNA 1..19: ncRNA_class = siRNA
caggtgcgcttgttacggt

SEQ ID NO: 697 - RNA, 19 nt, synthetic construct
  source 1..19: mol_type = other RNA
  modified_base order(1..6,10..19): mod_base = OTHER; note = 2-prime-O-Methyl RNA nucleotides
  modified_base 7..9: mod_base = OTHER; note = 2-prime deoxy-2-prime-F RNA nucleotides
  modified_base 1^2: mod_base = OTHER; note = Phosphorothioate
  modified_base 2^3: mod_base = OTHER; note = Phosphorothioate
  modified_base 17^18: mod_base = OTHER; note = Phosphorothioate
  modified_base 18^19: mod_base = OTHER; note = Phosphorothioate
  ncRNA 1..19: ncRNA_class = siRNA
accgtaacaagcgcacctg

SEQ ID NO: 698 - RNA, 19 nt, synthetic construct
  source 1..19: mol_type = other RNA
  modified_base order(1,3,5,7,9,11,13,15,17,19): mod_base = OTHER; note = 2-prime-O-Methyl RNA nucleotides
  modified_base order(2,4,6,8,10,12,14,16,18): mod_base = OTHER; note = 2-prime deoxy-2-prime-F RNA nucleotides
  modified_base 1^2: mod_base = OTHER; note = Phosphorothioate
  modified_base 2^3: mod_base = OTHER; note = Phosphorothioate
  modified_base 17^18: mod_base = OTHER; note = Phosphorothioate
  modified_base 18^19: mod_base = OTHER; note = Phosphorothioate
  ncRNA 1..19: ncRNA_class = siRNA
gacgaagtcgtactcgcag

SEQ ID NO: 699 - RNA, 19 nt, synthetic construct
  source 1..19: mol_type = other RNA
  modified_base order(1..6,10..19): mod_base = OTHER; note = 2-prime-O-Methyl RNA nucleotides
  modified_base 7..9: mod_base = OTHER; note = 2-prime deoxy-2-prime-F RNA nucleotides
  modified_base 1^2: mod_base = OTHER; note = Phosphorothioate
  modified_base 2^3: mod_base = OTHER; note = Phosphorothioate
  modified_base 17^18: mod_base = OTHER; note = Phosphorothioate
  modified_base 18^19: mod_base = OTHER; note = Phosphorothioate
  ncRNA 1..19: ncRNA_class = siRNA
ctgcgagtacgacttcgtc

SEQ ID NO: 700 - RNA, 19 nt, synthetic construct
  source 1..19: mol_type = other RNA
  modified_base order(1,3,5,7,9,11,13,15,17,19): mod_base = OTHER; note = 2-prime-O-Methyl RNA nucleotides
  modified_base order(2,4,6,8,10,12,14,16,18): mod_base = OTHER; note = 2-prime deoxy-2-prime-F RNA nucleotides
  modified_base 1^2: mod_base = OTHER; note = Phosphorothioate
  modified_base 2^3: mod_base = OTHER; note = Phosphorothioate
  modified_base 17^18: mod_base = OTHER; note = Phosphorothioate
  modified_base 18^19: mod_base = OTHER; note = Phosphorothioate
  ncRNA 1..19: ncRNA_class = siRNA
aggtaatgtccaggctgga

SEQ ID NO: 701 - RNA, 19 nt, synthetic construct
  source 1..19: mol_type = other RNA
  modified_base order(1..6,10..19): mod_base = OTHER; note = 2-prime-O-Methyl RNA nucleotides
  modified_base 7..9: mod_base = OTHER; note = 2-prime deoxy-2-prime-F RNA nucleotides
  modified_base 1^2: mod_base = OTHER; note = Phosphorothioate
  modified_base 2^3: mod_base = OTHER; note = Phosphorothioate
  modified_base 17^18: mod_base = OTHER; note = Phosphorothioate
  modified_base 18^19: mod_base = OTHER; note = Phosphorothioate
  ncRNA 1..19: ncRNA_class = siRNA
tccagcctggacattacct

SEQ ID NO: 702 - RNA, 19 nt, synthetic construct
  source 1..19: mol_type = other RNA
  modified_base order(1,3,5,7,9,11,13,15,17,19): mod_base = OTHER; note = 2-prime-O-Methyl RNA nucleotides
  modified_base order(2,4,6,8,10,12,14,16,18): mod_base = OTHER; note = 2-prime deoxy-2-prime-F RNA nucleotides
  modified_base 1^2: mod_base = OTHER; note = Phosphorothioate
  modified_base 2^3: mod_base = OTHER; note = Phosphorothioate
  modified_base 17^18: mod_base = OTHER; note = Phosphorothioate
  modified_base 18^19: mod_base = OTHER; note = Phosphorothioate
  ncRNA 1..19: ncRNA_class = siRNA
tgacgaagtcgtactcgca

SEQ ID NO: 703 - RNA, 19 nt, synthetic construct
  source 1..19: mol_type = other RNA
  modified_base order(1..6,10..19): mod_base = OTHER; note = 2-prime-O-Methyl RNA nucleotides
  modified_base 7..9: mod_base = OTHER; note = 2-prime deoxy-2-prime-F RNA nucleotides
  modified_base 1^2: mod_base = OTHER; note = Phosphorothioate
  modified_base 2^3: mod_base = OTHER; note = Phosphorothioate
  modified_base 17^18: mod_base = OTHER; note = Phosphorothioate
  modified_base 18^19: mod_base = OTHER; note = Phosphorothioate
  ncRNA 1..19: ncRNA_class = siRNA
tgcgagtacgacttcgtca

SEQ ID NO: 704 - RNA, 19 nt, synthetic construct
  source 1..19: mol_type = other RNA
  modified_base order(1,3,5,7,9,11,13,15,17,19): mod_base = OTHER; note = 2-prime-O-Methyl RNA nucleotides
  modified_base order(2,4,6,8,10,12,14,16,18): mod_base = OTHER; note = 2-prime deoxy-2-prime-F RNA nucleotides
  modified_base 1^2: mod_base = OTHER; note = Phosphorothioate
  modified_base 2^3: mod_base = OTHER; note = Phosphorothioate
  modified_base 17^18: mod_base = OTHER; note = Phosphorothioate
  modified_base 18^19: mod_base = OTHER; note = Phosphorothioate
  ncRNA 1..19: ncRNA_class = siRNA
ctgtgctcgtgtagtggat

SEQ ID NO: 705 - RNA, 19 nt, synthetic construct
  source 1..19: mol_type = other RNA
  modified_base order(1..6,10..19): mod_base = OTHER; note = 2-prime-O-Methyl RNA nucleotides
  modified_base 7..9: mod_base = OTHER; note = 2-prime deoxy-2-prime-F RNA nucleotides
  modified_base 1^2: mod_base = OTHER; note = Phosphorothioate
  modified_base 2^3: mod_base = OTHER; note = Phosphorothioate
  modified_base 17^18: mod_base = OTHER; note = Phosphorothioate
  modified_base 18^19: mod_base = OTHER; note = Phosphorothioate
  ncRNA 1..19: ncRNA_class = siRNA
atccactacacgagcacag

SEQ ID NO: 706 - RNA, 19 nt, synthetic construct
  source 1..19: mol_type = other RNA
  modified_base order(1,3,5,7,9,11,13,15,17,19): mod_base = OTHER; note = 2-prime-O-Methyl RNA nucleotides
  modified_base order(2,4,6,8,10,12,14,16,18): mod_base = OTHER; note = 2-prime deoxy-2-prime-F RNA nucleotides
  modified_base 1^2: mod_base = OTHER; note = Phosphorothioate
  modified_base 2^3: mod_base = OTHER; note = Phosphorothioate
  modified_base 17^18: mod_base = OTHER; note = Phosphorothioate
  modified_base 18^19: mod_base = OTHER; note = Phosphorothioate
  ncRNA 1..19: ncRNA_class = siRNA
tcataaaggattcagcttc

SEQ ID NO: 707 - RNA, 19 nt, synthetic construct
  source 1..19: mol_type = other RNA
  modified_base order(1..6,10..19): mod_base = OTHER; note = 2-prime-O-Methyl RNA nucleotides
  modified_base 7..9: mod_base = OTHER; note = 2-prime deoxy-2-prime-F RNA nucleotides
  modified_base 1^2: mod_base = OTHER; note = Phosphorothioate
  modified_base 2^3: mod_base = OTHER; note = Phosphorothioate
  modified_base 17^18: mod_base = OTHER; note = Phosphorothioate
  modified_base 18^19: mod_base = OTHER; note = Phosphorothioate
  ncRNA 1..19: ncRNA_class = siRNA
gaagctgaatcctttatga

SEQ ID NO: 708 - RNA, 19 nt, synthetic construct
  source 1..19: mol_type = other RNA
  modified_base order(1,3,5,7,9,11,13,15,17,19): mod_base = OTHER; note = 2-prime-O-Methyl RNA nucleotides
  modified_base order(2,4,6,8,10,12,14,16,18): mod_base = OTHER; note = 2-prime deoxy-2-prime-F RNA nucleotides
  modified_base 1^2: mod_base = OTHER; note = Phosphorothioate
  modified_base 2^3: mod_base = OTHER; note = Phosphorothioate
  modified_base 17^18: mod_base = OTHER; note = Phosphorothioate
  modified_base 18^19: mod_base = OTHER; note = Phosphorothioate
  ncRNA 1..19: ncRNA_class = siRNA
acatacattagatttctag

SEQ ID NO: 709 - RNA, 19 nt, synthetic construct
  source 1..19: mol_type = other RNA
  modified_base order(1..6,10..19): mod_base = OTHER; note = 2-prime-O-Methyl RNA nucleotides
  modified_base 7..9: mod_base = OTHER; note = 2-prime deoxy-2-prime-F RNA nucleotides
  modified_base 1^2: mod_base = OTHER; note = Phosphorothioate
  modified_base 2^3: mod_base = OTHER; note = Phosphorothioate
  modified_base 17^18: mod_base = OTHER; note = Phosphorothioate
  modified_base 18^19: mod_base = OTHER; note = Phosphorothioate
  ncRNA 1..19: ncRNA_class = siRNA
ctagaaatctaatgtatgt

SEQ ID NO: 710 - RNA, 19 nt, synthetic construct
  source 1..19: mol_type = other RNA
  modified_base order(1,3,5,7,9,11,13,15,17,19): mod_base = OTHER; note = 2-prime-O-Methyl RNA nucleotides
  modified_base order(2,4,6,8,10,12,14,16,18): mod_base = OTHER; note = 2-prime deoxy-2-prime-F RNA nucleotides
  modified_base 1^2: mod_base = OTHER; note = Phosphorothioate
  modified_base 2^3: mod_base = OTHER; note = Phosphorothioate
  modified_base 17^18: mod_base = OTHER; note = Phosphorothioate
  modified_base 18^19: mod_base = OTHER; note = Phosphorothioate
  ncRNA 1..19: ncRNA_class = siRNA
catacattagatttctagc

SEQ ID NO: 711 - RNA, 19 nt, synthetic construct
  source 1..19: mol_type = other RNA
  modified_base order(1..6,10..19): mod_base = OTHER; note = 2-prime-O-Methyl RNA nucleotides
  modified_base 7..9: mod_base = OTHER; note = 2-prime deoxy-2-prime-F RNA nucleotides
  modified_base 1^2: mod_base = OTHER; note = Phosphorothioate
  modified_base 2^3: mod_base = OTHER; note = Phosphorothioate
  modified_base 17^18: mod_base = OTHER; note = Phosphorothioate
  modified_base 18^19: mod_base = OTHER; note = Phosphorothioate
  ncRNA 1..19: ncRNA_class = siRNA
gctagaaatctaatgtatg

SEQ ID NO: 712 - RNA, 19 nt, synthetic construct
  source 1..19: mol_type = other RNA
  modified_base order(1,3,5,7,9,11,13,15,17,19): mod_base = OTHER; note = 2-prime-O-Methyl RNA nucleotides
  modified_base order(2,4,6,8,10,12,14,16,18): mod_base = OTHER; note = 2-prime deoxy-2-prime-F RNA nucleotides
  modified_base 1^2: mod_base = OTHER; note = Phosphorothioate
  modified_base 2^3: mod_base = OTHER; note = Phosphorothioate
  modified_base 17^18: mod_base = OTHER; note = Phosphorothioate
  modified_base 18^19: mod_base = OTHER; note = Phosphorothioate
  ncRNA 1..19: ncRNA_class = siRNA
agcatcatgagtataacct

SEQ ID NO: 713 - RNA, 19 nt, synthetic construct
  source 1..19: mol_type = other RNA
  modified_base order(1..6,10..19): mod_base = OTHER; note = 2-prime-O-Methyl RNA nucleotides
  modified_base 7..9: mod_base = OTHER; note = 2-prime deoxy-2-prime-F RNA nucleotides
  modified_base 1^2: mod_base = OTHER; note = Phosphorothioate
  modified_base 2^3: mod_base = OTHER; note = Phosphorothioate
  modified_base 17^18: mod_base = OTHER; note = Phosphorothioate
  modified_base 18^19: mod_base = OTHER; note = Phosphorothioate
  ncRNA 1..19: ncRNA_class = siRNA
aggttatactcatgatgct

SEQ ID NO: 714 - RNA, 19 nt, synthetic construct
  source 1..19: mol_type = other RNA
  modified_base order(1,3,5,7,9,11,13,15,17,19): mod_base = OTHER; note = 2-prime-O-Methyl RNA nucleotides
  modified_base order(2,4,6,8,10,12,14,16,18): mod_base = OTHER; note = 2-prime deoxy-2-prime-F RNA nucleotides
  modified_base 1^2: mod_base = OTHER; note = Phosphorothioate
  modified_base 2^3: mod_base = OTHER; note = Phosphorothioate
  modified_base 17^18: mod_base = OTHER; note = Phosphorothioate
  modified_base 18^19: mod_base = OTHER; note = Phosphorothioate
  ncRNA 1..19: ncRNA_class = siRNA
cttcatgtataaaaacagc

SEQ ID NO: 715 - RNA, 19 nt, synthetic construct
  source 1..19: mol_type = other RNA
  modified_base order(1..6,10..19): mod_base = OTHER; note = 2-prime-O-Methyl RNA nucleotides
  modified_base 7..9: mod_base = OTHER; note = 2-prime deoxy-2-prime-F RNA nucleotides
  modified_base 1^2: mod_base = OTHER; note = Phosphorothioate
  modified_base 2^3: mod_base = OTHER; note = Phosphorothioate
  modified_base 17^18: mod_base = OTHER; note = Phosphorothioate
  modified_base 18^19: mod_base = OTHER; note = Phosphorothioate
  ncRNA 1..19: ncRNA_class = siRNA
gctgtttttatacatgaag

SEQ ID NO: 716 - RNA, 19 nt, synthetic construct
  source 1..19: mol_type = other RNA
  modified_base order(1,3,5,7,9,11,13,15,17,19): mod_base = OTHER; note = 2-prime-O-Methyl RNA nucleotides
  modified_base order(2,4,6,8,10,12,14,16,18): mod_base = OTHER; note = 2-prime deoxy-2-prime-F RNA nucleotides
  modified_base 1^2: mod_base = OTHER; note = Phosphorothioate
  modified_base 2^3: mod_base = OTHER; note = Phosphorothioate
  modified_base 17^18: mod_base = OTHER; note = Phosphorothioate
  modified_base 18^19: mod_base = OTHER; note = Phosphorothioate
  ncRNA 1..19: ncRNA_class = siRNA
agacaaataggcgtgatgt

SEQ ID NO: 717 - RNA, 19 nt, synthetic construct
  source 1..19: mol_type = other RNA
  modified_base order(1..6,10..19): mod_base = OTHER; note = 2-prime-O-Methyl RNA nucleotides
  modified_base 7..9: mod_base = OTHER; note = 2-prime deoxy-2-prime-F RNA nucleotides
  modified_base 1^2: mod_base = OTHER; note = Phosphorothioate
  modified_base 2^3: mod_base = OTHER; note = Phosphorothioate
  modified_base 17^18: mod_base = OTHER; note = Phosphorothioate
  modified_base 18^19: mod_base = OTHER; note = Phosphorothioate
  ncRNA 1..19: ncRNA_class = siRNA
acatcacgcctatttgtct

SEQ ID NO: 718 - RNA, 19 nt, synthetic construct
  source 1..19: mol_type = other RNA
  modified_base order(1,3,5,7,9,11,13,15,17,19): mod_base = OTHER; note = 2-prime-O-Methyl RNA nucleotides
  modified_base order(2,4,6,8,10,12,14,16,18): mod_base = OTHER; note = 2-prime deoxy-2-prime-F RNA nucleotides
  modified_base 1^2: mod_base = OTHER; note = Phosphorothioate
  modified_base 2^3: mod_base = OTHER; note = Phosphorothioate
  modified_base 17^18: mod_base = OTHER; note = Phosphorothioate
  modified_base 18^19: mod_base = OTHER; note = Phosphorothioate
  ncRNA 1..19: ncRNA_class = siRNA
acaaataggcgtgatgttg

SEQ ID NO: 719 - RNA, 19 nt, synthetic construct
  source 1..19: mol_type = other RNA
  modified_base order(1..6,10..19): mod_base = OTHER; note = 2-prime-O-Methyl RNA nucleotides
  modified_base 7..9: mod_base = OTHER; note = 2-prime deoxy-2-prime-F RNA nucleotides
  modified_base 1^2: mod_base = OTHER; note = Phosphorothioate
  modified_base 2^3: mod_base = OTHER; note = Phosphorothioate
  modified_base 17^18: mod_base = OTHER; note = Phosphorothioate
  modified_base 18^19: mod_base = OTHER; note = Phosphorothioate
  ncRNA 1..19: ncRNA_class = siRNA
caacatcacgcctatttgt

SEQ ID NO: 720 - RNA, 19 nt, synthetic construct
  source 1..19: mol_type = other RNA
  modified_base order(1,3,5,7,9,11,13,15,17,19): mod_base = OTHER; note = 2-prime-O-Methyl RNA nucleotides
  modified_base order(2,4,6,8,10,12,14,16,18): mod_base = OTHER; note = 2-prime deoxy-2-prime-F RNA nucleotides
  modified_base 1^2: mod_base = OTHER; note = Phosphorothioate
  modified_base 2^3: mod_base = OTHER; note = Phosphorothioate
  modified_base 17^18: mod_base = OTHER; note = Phosphorothioate
  modified_base 18^19: mod_base = OTHER; note = Phosphorothioate
  ncRNA 1..19: ncRNA_class = siRNA
attgattacaactttgtta

SEQ ID NO: 721 - RNA, 19 nt, synthetic construct
  source 1..19: mol_type = other RNA
  modified_base order(1..6,10..19): mod_base = OTHER; note = 2-prime-O-Methyl RNA nucleotides
  modified_base 7..9: mod_base = OTHER; note = 2-prime deoxy-2-prime-F RNA nucleotides
  modified_base 1^2: mod_base = OTHER; note = Phosphorothioate
  modified_base 2^3: mod_base = OTHER; note = Phosphorothioate
  modified_base 17^18: mod_base = OTHER; note = Phosphorothioate
  modified_base 18^19: mod_base = OTHER; note = Phosphorothioate
  ncRNA 1..19: ncRNA_class = siRNA
taacaaagttgtaatcaat

SEQ ID NO: 722 - RNA, 19 nt, synthetic construct
  source 1..19: mol_type = other RNA
  modified_base order(1,3,5,7,9,11,13,15,17,19): mod_base = OTHER; note = 2-prime-O-Methyl RNA nucleotides
  modified_base order(2,4,6,8,10,12,14,16,18): mod_base = OTHER; note = 2-prime deoxy-2-prime-F RNA nucleotides
  modified_base 1^2: mod_base = OTHER; note = Phosphorothioate
  modified_base 2^3: mod_base = OTHER; note = Phosphorothioate
  modified_base 17^18: mod_base = OTHER; note = Phosphorothioate
  modified_base 18^19: mod_base = OTHER; note = Phosphorothioate
  ncRNA 1..19: ncRNA_class = siRNA
tgtcatctgtcctcataaa

SEQ ID NO: 723 - RNA, 19 nt, synthetic construct
  source 1..19: mol_type = other RNA
  modified_base order(1..6,10..19): mod_base = OTHER; note = 2-prime-O-Methyl RNA nucleotides
  modified_base 7..9: mod_base = OTHER; note = 2-prime deoxy-2-prime-F RNA nucleotides
  modified_base 1^2: mod_base = OTHER; note = Phosphorothioate
  modified_base 2^3: mod_base = OTHER; note = Phosphorothioate
  modified_base 17^18: mod_base = OTHER; note = Phosphorothioate
  modified_base 18^19: mod_base = OTHER; note = Phosphorothioate
  ncRNA 1..19: ncRNA_class = siRNA
tttatgaggacagatgaca

SEQ ID NO: 724 - RNA, 19 nt, synthetic construct
  source 1..19: mol_type = other RNA
  modified_base order(1,3,5,7,9,11,13,15,17,19): mod_base = OTHER; note = 2-prime-O-Methyl RNA nucleotides
  modified_base order(2,4,6,8,10,12,14,16,18): mod_base = OTHER; note = 2-prime deoxy-2-prime-F RNA nucleotides
  modified_base 1^2: mod_base = OTHER; note = Phosphorothioate
  modified_base 2^3: mod_base = OTHER; note = Phosphorothioate
  modified_base 17^18: mod_base = OTHER; note = Phosphorothioate
  modified_base 18^19: mod_base = OTHER; note = Phosphorothioate
  ncRNA 1..19: ncRNA_class = siRNA
atgagtataaccttcatgt

SEQ ID NO: 725 - RNA, 19 nt, synthetic construct
  source 1..19: mol_type = other RNA
  modified_base order(1..6,10..19): mod_base = OTHER; note = 2-prime-O-Methyl RNA nucleotides
  modified_base 7..9: mod_base = OTHER; note = 2-prime deoxy-2-prime-F RNA nucleotides
  modified_base 1^2: mod_base = OTHER; note = Phosphorothioate
  modified_base 2^3: mod_base = OTHER; note = Phosphorothioate
  modified_base 17^18: mod_base = OTHER; note = Phosphorothioate
  modified_base 18^19: mod_base = OTHER; note = Phosphorothioate
  ncRNA 1..19: ncRNA_class = siRNA
acatgaaggttatactcat

SEQ ID NO: 726 - RNA, 19 nt, synthetic construct
  source 1..19: mol_type = other RNA
  modified_base order(1,3,5,7,9,11,13,15,17,19): mod_base = OTHER; note = 2-prime-O-Methyl RNA nucleotides
  modified_base order(2,4,6,8,10,12,14,16,18): mod_base = OTHER; note = 2-prime deoxy-2-prime-F RNA nucleotides
  modified_base 1^2: mod_base = OTHER; note = Phosphorothioate
  modified_base 2^3: mod_base = OTHER; note = Phosphorothioate
  modified_base 17^18: mod_base = OTHER; note = Phosphorothioate
  modified_base 18^19: mod_base = OTHER; note = Phosphorothioate
  ncRNA 1..19: ncRNA_class = siRNA
ctcgtcaatgtcctcggct

SEQ ID NO: 727 - RNA, 19 nt, synthetic construct
  source 1..19: mol_type = other RNA
  modified_base order(1..6,10..19): mod_base = OTHER; note = 2-prime-O-Methyl RNA nucleotides
  modified_base 7..9: mod_base = OTHER; note = 2-prime deoxy-2-prime-F RNA nucleotides
  modified_base 1^2: mod_base = OTHER; note = Phosphorothioate
  modified_base 2^3: mod_base = OTHER; note = Phosphorothioate
  modified_base 17^18: mod_base = OTHER; note = Phosphorothioate
  modified_base 18^19: mod_base = OTHER; note = Phosphorothioate
  ncRNA 1..19: ncRNA_class = siRNA
agccgaggacattgacgag

SEQ ID NO: 728 - RNA, 19 nt, synthetic construct
  source 1..19: mol_type = other RNA
  modified_base order(1,3,5,7,9,11,13,15,17,19): mod_base = OTHER; note = 2-prime-O-Methyl RNA nucleotides
  modified_base order(2,4,6,8,10,12,14,16,18): mod_base = OTHER; note = 2-prime deoxy-2-prime-F RNA nucleotides
  modified_base 1^2: mod_base = OTHER; note = 2-prime-O-Methyl RNA nucleotides
  modified_base 2^3: mod_base = OTHER; note = 2-prime-O-Methyl RNA nucleotides
  modified_base 17^18: mod_base = OTHER; note = 2-prime-O-Methyl RNA nucleotides
  modified_base 18^19: mod_base = OTHER; note = 2-prime-O-Methyl RNA nucleotides
  ncRNA 1..19: ncRNA_class = siRNA
cttgacgaagtcgtactcg

SEQ ID NO: 729 - RNA, 19 nt, synthetic construct
  source 1..19: mol_type = other RNA
  modified_base order(1..6,10..19): mod_base = OTHER; note = 2-prime-O-Methyl RNA nucleotides
  modified_base 7..9: mod_base = OTHER; note = 2-prime deoxy-2-prime-F RNA nucleotides
  modified_base 1^2: mod_base = OTHER; note = Phosphorothioate
  modified_base 2^3: mod_base = OTHER; note = Phosphorothioate
  modified_base 17^18: mod_base = OTHER; note = Phosphorothioate
  modified_base 18^19: mod_base = OTHER; note = Phosphorothioate
  ncRNA 1..19: ncRNA_class = siRNA
cgagtacgacttcgtcaag

SEQ ID NO: 730 - RNA, 19 nt, synthetic construct
  source 1..19: mol_type = other RNA
  modified_base order(1,3,5,7,9,11,13,15,17,19): mod_base = OTHER; note = 2-prime-O-Methyl RNA nucleotides
  modified_base order(2,4,6,8,10,12,14,16,18): mod_base = OTHER; note = 2-prime deoxy-2-prime-F RNA nucleotides
  modified_base 1^2: mod_base = OTHER; note = Phosphorothioate
  modified_base 2^3: mod_base = OTHER; note = Phosphorothioate
  modified_base 17^18: mod_base = OTHER; note = Phosphorothioate
  modified_base 18^19: mod_base = OTHER; note = Phosphorothioate
  ncRNA 1..19: ncRNA_class = siRNA
ttaatccccatccagatgc

SEQ ID NO: 731 - RNA, 19 nt, synthetic construct
  source 1..19: mol_type = other RNA
  modified_base order(1..6,10..19): mod_base = OTHER; note = 2-prime-O-Methyl RNA nucleotides
  modified_base 7..9: mod_base = OTHER; note = 2-prime deoxy-2-prime-F RNA nucleotides
  modified_base 1^2: mod_base = OTHER; note = Phosphorothioate
  modified_base 2^3: mod_base = OTHER; note = Phosphorothioate
  modified_base 17^18: mod_base = OTHER; note = Phosphorothioate
  modified_base 18^19: mod_base = OTHER; note = Phosphorothioate
  ncRNA 1..19: ncRNA_class = siRNA
gcatctggatggggattaa

SEQ ID NO: 732 - RNA, 19 nt, synthetic construct
  source 1..19: mol_type = other RNA
  modified_base order(1,3,5,7,9,11,13,15,17,19): mod_base = OTHER; note = 2-prime-O-Methyl RNA nucleotides
  modified_base order(2,4,6,8,10,12,14,16,18): mod_base = OTHER; note = 2-prime deoxy-2-prime-F RNA nucleotides
  modified_base 1^2: mod_base = OTHER; note = Phosphorothioate
  modified_base 2^3: mod_base = OTHER; note = Phosphorothioate
  modified_base 17^18: mod_base = OTHER; note = Phosphorothioate
  modified_base 18^19: mod_base = OTHER; note = Phosphorothioate
  ncRNA 1..19: ncRNA_class = siRNA
gtactcgcagaggtgggag

SEQ ID NO: 733 - RNA, 19 nt, synthetic construct
  source 1..19: mol_type = other RNA
  modified_base order(1..6,10..19): mod_base = OTHER; note = 2-prime-O-Methyl RNA nucleotides
  modified_base 7..9: mod_base = OTHER; note = 2-prime deoxy-2-prime-F RNA nucleotides
  modified_base 1^2: mod_base = OTHER; note = Phosphorothioate
  modified_base 2^3: mod_base = OTHER; note = Phosphorothioate
  modified_base 17^18: mod_base = OTHER; note = Phosphorothioate
  modified_base 18^19: mod_base = OTHER; note = Phosphorothioate
  ncRNA 1..19: ncRNA_class = siRNA
ctcccacctctgcgagtac

SEQ ID NO: 734 - RNA, 19 nt, synthetic construct
  source 1..19: mol_type = other RNA
  modified_base order(1,3,5,7,9,11,13,15,17,19): mod_base = OTHER; note = 2-prime-O-Methyl RNA nucleotides
  modified_base order(2,4,6,8,10,12,14,16,18): mod_base = OTHER; note = 2-prime deoxy-2-prime-F RNA nucleotides
  modified_base 1^2: mod_base = OTHER; note = Phosphorothioate
  modified_base 2^3: mod_base = OTHER; note = Phosphorothioate
  modified_base 17^18: mod_base = OTHER; note = Phosphorothioate
  modified_base 18^19: mod_base = OTHER; note = Phosphorothioate
  ncRNA 1..19: ncRNA_class = siRNA
atagaaggcctcgaacccc

SEQ ID NO: 735 - RNA, 19 nt, synthetic construct
  source 1..19: mol_type = other RNA
  modified_base order(1..6,10..19): mod_base = OTHER; note = 2-prime-O-Methyl RNA nucleotides
  modified_base 7..9: mod_base = OTHER; note = 2-prime deoxy-2-prime-F RNA nucleotides
  modified_base 1^2: mod_base = OTHER; note = Phosphorothioate
  modified_base 2^3: mod_base = OTHER; note = Phosphorothioate
  modified_base 17^18: mod_base = OTHER; note = Phosphorothioate
  modified_base 18^19: mod_base = OTHER; note = Phosphorothioate
  ncRNA 1..19: ncRNA_class = siRNA
ggggttcgaggccttctat

SEQ ID NO: 736 - RNA, 19 nt, synthetic construct
  source 1..19: mol_type = other RNA
  modified_base order(1,3,5,7,9,11,13,15,17,19): mod_base = OTHER; note = 2-prime-O-Methyl RNA nucleotides
  modified_base order(2,4,6,8,10,12,14,16,18): mod_base = OTHER; note = 2-prime deoxy-2-prime-F RNA nucleotides
  modified_base 1^2: mod_base = OTHER; note = Phosphorothioate
  modified_base 2^3: mod_base = OTHER; note = Phosphorothioate
  modified_base 17^18: mod_base = OTHER; note = Phosphorothioate
  modified_base 18^19: mod_base = OTHER; note = Phosphorothioate
  ncRNA 1..19: ncRNA_class = siRNA
atttaatcagtgctatgtc

SEQ ID NO: 737 - RNA, 19 nt, synthetic construct
  source 1..19: mol_type = other RNA
  modified_base order(1..6,10..19): mod_base = OTHER; note = 2-prime-O-Methyl RNA nucleotides
  modified_base 7..9: mod_base = OTHER; note = 2-prime deoxy-2-prime-F RNA nucleotides
  modified_base 1^2: mod_base = OTHER; note = Phosphorothioate
  modified_base 2^3: mod_base = OTHER; note = Phosphorothioate
  modified_base 17^18: mod_base = OTHER; note = Phosphorothioate
  modified_base 18^19: mod_base = OTHER; note = Phosphorothioate
  ncRNA 1..19: ncRNA_class = siRNA
gacatagcactgattaaat

SEQ ID NO: 738 - RNA, 19 nt, synthetic construct
  source 1..19: mol_type = other RNA
  modified_base order(1,3,5,7,9,11,13,15,17,19): mod_base = OTHER; note = 2-prime-O-Methyl RNA nucleotides
  modified_base order(2,4,6,8,10,12,14,16,18): mod_base = OTHER; note = 2-prime deoxy-2-prime-F RNA nucleotides
  modified_base 1^2: mod_base = OTHER; note = Phosphorothioate
  modified_base 2^3: mod_base = OTHER; note = Phosphorothioate
  modified_base 17^18: mod_base = OTHER; note = Phosphorothioate
  modified_base 18^19: mod_base = OTHER; note = Phosphorothioate
  ncRNA 1..19: ncRNA_class = siRNA
atgtcatctgtcctcataa

SEQ ID NO: 739 - RNA, 19 nt, synthetic construct
  source 1..19: mol_type = other RNA
  modified_base order(1..6,10..19): mod_base = OTHER; note = 2-prime-O-Methyl RNA nucleotides
  modified_base 7..9: mod_base = OTHER; note = 2-prime deoxy-2-prime-F RNA nucleotides
  modified_base 1^2: mod_base = OTHER; note = Phosphorothioate
  modified_base 2^3: mod_base = OTHER; note = Phosphorothioate
  modified_base 17^18: mod_base = OTHER; note = Phosphorothioate
  modified_base 18^19: mod_base = OTHER; note = Phosphorothioate
  ncRNA 1..19: ncRNA_class = siRNA
ttatgaggacagatgacat

SEQ ID NO: 740 - RNA, 19 nt, synthetic construct
  source 1..19: mol_type = other RNA
  modified_base order(1,3,5,7,9,11,13,15,17,19): mod_base = OTHER; note = 2-prime-O-Methyl RNA nucleotides
  modified_base order(2,4,6,8,10,12,14,16,18): mod_base = OTHER; note = 2-prime deoxy-2-prime-F RNA nucleotides
  modified_base 1^2: mod_base = OTHER; note = Phosphorothioate
  modified_base 2^3: mod_base = OTHER; note = Phosphorothioate
  modified_base 17^18: mod_base = OTHER; note = Phosphorothioate
  modified_base 18^19: mod_base = OTHER; note = Phosphorothioate
  ncRNA 1..19: ncRNA_class = siRNA
agtatgaaaagagactggc

SEQ ID NO: 741 - RNA, 19 nt, synthetic construct
  source 1..19: mol_type = other RNA
  modified_base order(1..6,10..19): mod_base = OTHER; note = 2-prime-O-Methyl RNA nucleotides
  modified_base 7..9: mod_base = OTHER; note = 2-prime deoxy-2-prime-F RNA nucleotides
  modified_base 1^2: mod_base = OTHER; note = Phosphorothioate
  modified_base 2^3: mod_base = OTHER; note = Phosphorothioate
  modified_base 17^18: mod_base = OTHER; note = Phosphorothioate
  modified_base 18^19: mod_base = OTHER; note = Phosphorothioate
  ncRNA 1..19: ncRNA_class = siRNA
gccagtctcttttcatact

SEQ ID NO: 742 - RNA, 19 nt, synthetic construct
  source 1..19: mol_type = other RNA
  modified_base order(1,3,5,7,9,11,13,15,17,19): mod_base = OTHER; note = 2-prime-O-Methyl RNA nucleotides
  modified_base order(2,4,6,8,10,12,14,16,18): mod_base = OTHER; note = 2-prime deoxy-2-prime-F RNA nucleotides
  modified_base 1^2: mod_base = OTHER; note = Phosphorothioate
  modified_base 2^3: mod_base = OTHER; note = Phosphorothioate
  modified_base 17^18: mod_base = OTHER; note = Phosphorothioate
  modified_base 18^19: mod_base = OTHER; note = Phosphorothioate
  ncRNA 1..19: ncRNA_class = siRNA
gttagcagttacacttccc

SEQ ID NO: 743 - RNA, 19 nt, synthetic construct
  source 1..19: mol_type = other RNA
  modified_base order(1..6,10..19): mod_base = OTHER; note = 2-prime-O-Methyl RNA nucleotides
  modified_base 7..9: mod_base = OTHER; note = 2-prime deoxy-2-prime-F RNA nucleotides
  modified_base 1^2: mod_base = OTHER; note = Phosphorothioate
  modified_base 2^3: mod_base = OTHER; note = Phosphorothioate
  modified_base 17^18: mod_base = OTHER; note = Phosphorothioate
  modified_base 18^19: mod_base = OTHER; note = Phosphorothioate
  ncRNA 1..19: ncRNA_class = siRNA
gggaagtgtaactgctaac

SEQ ID NO: 744 - RNA, 19 nt, synthetic construct
  source 1..19: mol_type = other RNA
  modified_base order(1,3,5,7,9,11,13,15,17,19): mod_base = OTHER; note = 2-prime-O-Methyl RNA nucleotides
  modified_base order(2,4,6,8,10,12,14,16,18): mod_base = OTHER; note = 2-prime deoxy-2-prime-F RNA nucleotides
  modified_base 1^2: mod_base = OTHER; note = Phosphorothioate
  modified_base 2^3: mod_base = OTHER; note = Phosphorothioate
  modified_base 17^18: mod_base = OTHER; note = Phosphorothioate
  modified_base 18^19: mod_base = OTHER; note = Phosphorothioate
  ncRNA 1..19: ncRNA_class = siRNA
agccagtatgaaaagagac

SEQ ID NO: 745 - RNA, 19 nt, synthetic construct
  source 1..19: mol_type = other RNA
  modified_base order(1..6,10..19): mod_base = OTHER; note = 2-prime-O-Methyl RNA nucleotides
  modified_base 7..9: mod_base = OTHER; note = 2-prime deoxy-2-prime-F RNA nucleotides
  modified_base 1^2: mod_base = OTHER; note = Phosphorothioate
  modified_base 2^3: mod_base = OTHER; note = Phosphorothioate
  modified_base 17^18: mod_base = OTHER; note = Phosphorothioate
  modified_base 18^19: mod_base = OTHER; note = Phosphorothioate
  ncRNA 1..19: ncRNA_class = siRNA
gtctcttttcatactggct

SEQ ID NO: 746 - RNA, 19 nt, synthetic construct
  source 1..19: mol_type = other RNA
  modified_base order(1,3,5,7,9,11,13,15,17,19): mod_base = OTHER; note = 2-prime-O-Methyl RNA nucleotides
  modified_base order(2,4,6,8,10,12,14,16,18): mod_base = OTHER; note = 2-prime deoxy-2-prime-F RNA nucleotides
  modified_base 1^2: mod_base = OTHER; note = Phosphorothioate
  modified_base 2^3: mod_base = OTHER; note = Phosphorothioate
  modified_base 17^18: mod_base = OTHER; note = Phosphorothioate
  modified_base 18^19: mod_base = OTHER; note = Phosphorothioate
  ncRNA 1..19: ncRNA_class = siRNA
gatgtatttggcttgcaca

SEQ ID NO: 747 - RNA, 19 nt, synthetic construct
  source 1..19: mol_type = other RNA
  modified_base order(1..6,10..19): mod_base = OTHER; note = 2-prime-O-Methyl RNA nucleotides
  modified_base 7..9: mod_base = OTHER; note = 2-prime deoxy-2-prime-F RNA nucleotides
  modified_base 1^2: mod_base = OTHER; note = Phosphorothioate
  modified_base 2^3: mod_base = OTHER; note = Phosphorothioate
  modified_base 17^18: mod_base = OTHER; note = Phosphorothioate
  modified_base 18^19: mod_base = OTHER; note = Phosphorothioate
  ncRNA 1..19: ncRNA_class = siRNA
tgtgcaagccaaatacatc

SEQ ID NO: 748 - RNA, 19 nt, synthetic construct
  source 1..19: mol_type = other RNA
  modified_base order(1,3,5,7,9,11,13,15,17,19): mod_base = OTHER; note = 2-prime-O-Methyl RNA nucleotides
  modified_base order(2,4,6,8,10,12,14,16,18): mod_base = OTHER; note = 2-prime deoxy-2-prime-F RNA nucleotides
  modified_base 1^2: mod_base = OTHER; note = Phosphorothioate
  modified_base 2^3: mod_base = OTHER; note = Phosphorothioate
  modified_base 17^18: mod_base = OTHER; note = Phosphorothioate
  modified_base 18^19: mod_base = OTHER; note = Phosphorothioate
  ncRNA 1..19: ncRNA_class = siRNA
aatgccaacagccagtatg

SEQ ID NO: 749 - RNA, 19 nt, synthetic construct
  source 1..19: mol_type = other RNA
  modified_base order(1..6,10..19): mod_base = OTHER; note = 2-prime-O-Methyl RNA nucleotides
  modified_base 7..9: mod_base = OTHER; note = 2-prime deoxy-2-prime-F RNA nucleotides
  modified_base 1^2: mod_base = OTHER; note = Phosphorothioate
  modified_base 2^3: mod_base = OTHER; note = Phosphorothioate
  modified_base 17^18: mod_base = OTHER; note = Phosphorothioate
  modified_base 18^19: mod_base = OTHER; note = Phosphorothioate
  ncRNA 1..19: ncRNA_class = siRNA
catactggctgttggcatt

SEQ ID NO: 750 - RNA, 19 nt, synthetic construct
  source 1..19: mol_type = other RNA
  modified_base order(1,3,5,7,9,11,13,15,17,19): mod_base = OTHER; note = 2-prime-O-Methyl RNA nucleotides
  modified_base order(2,4,6,8,10,12,14,16,18): mod_base = OTHER; note = 2-prime deoxy-2-prime-F RNA nucleotides
  modified_base 1^2: mod_base = OTHER; note = Phosphorothioate
  modified_base 2^3: mod_base = OTHER; note = Phosphorothioate
  modified_base 17^18: mod_base = OTHER; note = Phosphorothioate
  modified_base 18^19: mod_base = OTHER; note = Phosphorothioate
  ncRNA 1..19: ncRNA_class = siRNA
agcatgttagcagttacac

SEQ ID NO: 751 - RNA, 19 nt, synthetic construct
  source 1..19: mol_type = other RNA
  modified_base order(1..6,10..19): mod_base = OTHER; note = 2-prime-O-Methyl RNA nucleotides
  modified_base 7..9: mod_base = OTHER; note = 2-prime deoxy-2-prime-F RNA nucleotides
  modified_base 1^2: mod_base = OTHER; note = Phosphorothioate
  modified_base 2^3: mod_base = OTHER; note = Phosphorothioate
  modified_base 17^18: mod_base = OTHER; note = Phosphorothioate
  modified_base 18^19: mod_base = OTHER; note = Phosphorothioate
  ncRNA 1..19: ncRNA_class = siRNA
gtgtaactgctaacatgct

SEQ ID NO: 752 - RNA, 19 nt, synthetic construct
  source 1..19: mol_type = other RNA
  modified_base order(1,3,5,7,9,11,13,15,17,19): mod_base = OTHER; note = 2-prime-O-Methyl RNA nucleotides
  modified_base order(2,4,6,8,10,12,14,16,18): mod_base = OTHER; note = 2-prime deoxy-2-prime-F RNA nucleotides
  modified_base 1^2: mod_base = OTHER; note = Phosphorothioate
  modified_base 2^3: mod_base = OTHER; note = Phosphorothioate
  modified_base 17^18: mod_base = OTHER; note = Phosphorothioate
  modified_base 18^19: mod_base = OTHER; note = Phosphorothioate
  ncRNA 1..19: ncRNA_class = siRNA
tgtcatataaaagtgcacc

SEQ ID NO: 753 - RNA, 19 nt, synthetic construct
  source 1..19: mol_type = other RNA
  modified_base order(1..6,10..19): mod_base = OTHER; note = 2-prime-O-Methyl RNA nucleotides
  modified_base 7..9: mod_base = OTHER; note = 2-prime deoxy-2-prime-F RNA nucleotides
  modified_base 1^2: mod_base = OTHER; note = Phosphorothioate
  modified_base 2^3: mod_base = OTHER; note = Phosphorothioate
  modified_base 17^18: mod_base = OTHER; note = Phosphorothioate
  modified_base 18^19: mod_base = OTHER; note = Phosphorothioate
  ncRNA 1..19: ncRNA_class = siRNA
ggtgcacttttatatgaca

SEQ ID NO: 754 - RNA, 19 nt, synthetic construct
  source 1..19: mol_type = other RNA
  modified_base order(1,3,5,7,9,11,13,15,17,19): mod_base = OTHER; note = 2-prime-O-Methyl RNA nucleotides
  modified_base order(2,4,6,8,10,12,14,16,18): mod_base = OTHER; note = 2-prime deoxy-2-prime-F RNA nucleotides
  modified_base 1^2: mod_base = OTHER; note = Phosphorothioate
  modified_base 2^3: mod_base = OTHER; note = Phosphorothioate
  modified_base 17^18: mod_base = OTHER; note = Phosphorothioate
  modified_base 18^19: mod_base = OTHER; note = Phosphorothioate
  ncRNA 1..19: ncRNA_class = siRNA
gccaacagccagtatgaaa

SEQ ID NO: 755 - RNA, 19 nt, synthetic construct
  source 1..19: mol_type = other RNA
  modified_base order(1..6,10..19): mod_base = OTHER; note = 2-prime-O-Methyl RNA nucleotides
  modified_base 7..9: mod_base = OTHER; note = 2-prime deoxy-2-prime-F RNA nucleotides
  modified_base 1^2: mod_base = OTHER; note = Phosphorothioate
  modified_base 2^3: mod_base = OTHER; note = Phosphorothioate
  modified_base 17^18: mod_base = OTHER; note = Phosphorothioate
  modified_base 18^19: mod_base = OTHER; note = Phosphorothioate
  ncRNA 1..19: ncRNA_class = siRNA
tttcatactggctgttggc

SEQ ID NO: 756 - RNA, 19 nt, synthetic construct
  source 1..19: mol_type = other RNA
  modified_base order(1,3,5,7,9,11,13,15,17,19): mod_base = OTHER; note = 2-prime-O-Methyl RNA nucleotides
  modified_base order(2,4,6,8,10,12,14,16,18): mod_base = OTHER; note = 2-prime deoxy-2-prime-F RNA nucleotides
  modified_base 1^2: mod_base = OTHER; note = Phosphorothioate
  modified_base 2^3: mod_base = OTHER; note = Phosphorothioate
  modified_base 17^18: mod_base = OTHER; note = Phosphorothioate
  modified_base 18^19: mod_base = OTHER; note = Phosphorothioate
  ncRNA 1..19: ncRNA_class = siRNA
acaaagtccagaatgacac

SEQ ID NO: 757 - RNA, 19 nt, synthetic construct
  source 1..19: mol_type = other RNA
  modified_base order(1..6,10..19): mod_base = OTHER; note = 2-prime-O-Methyl RNA nucleotides
  modified_base 7..9: mod_base = OTHER; note = 2-prime deoxy-2-prime-F RNA nucleotides
  modified_base 1^2: mod_base = OTHER; note = Phosphorothioate
  modified_base 2^3: mod_base = OTHER; note = Phosphorothioate
  modified_base 17^18: mod_base = OTHER; note = Phosphorothioate
  modified_base 18^19: mod_base = OTHER; note = Phosphorothioate
  ncRNA 1..19: ncRNA_class = siRNA
gtgtcattctggactttgt

SEQ ID NO: 758 - RNA, 19 nt, synthetic construct
  source 1..19: mol_type = other RNA
  modified_base order(1,3,5,7,9,11,13,15,17,19): mod_base = OTHER; note = 2-prime-O-Methyl RNA nucleotides
  modified_base order(2,4,6,8,10,12,14,16,18): mod_base = OTHER; note = 2-prime deoxy-2-prime-F RNA nucleotides
  modified_base 1^2: mod_base = OTHER; note = Phosphorothioate
  modified_base 2^3: mod_base = OTHER; note = Phosphorothioate
  modified_base 17^18: mod_base = OTHER; note = Phosphorothioate
  modified_base 18^19: mod_base = OTHER; note = Phosphorothioate
  ncRNA 1..19: ncRNA_class = siRNA
aggttcaggccacttcggg

SEQ ID NO: 759 - RNA, 19 nt, synthetic construct
  source 1..19: mol_type = other RNA
  modified_base order(1..6,10..19): mod_base = OTHER; note = 2-prime-O-Methyl RNA nucleotides
  modified_base 7..9: mod_base = OTHER; note = 2-prime deoxy-2-prime-F RNA nucleotides
  modified_base 1^2: mod_base = OTHER; note = Phosphorothioate
  modified_base 2^3: mod_base = OTHER; note = Phosphorothioate
  modified_base 17^18: mod_base = OTHER; note = Phosphorothioate
  modified_base 18^19: mod_base = OTHER; note = Phosphorothioate
  ncRNA 1..19: ncRNA_class = siRNA
cccgaagtggcctgaacct

SEQ ID NO: 760 - RNA, 19 nt, synthetic construct
  source 1..19: mol_type = other RNA
  modified_base order(1,3,5,7,9,11,13,15,17,19): mod_base = OTHER; note = 2-prime-O-Methyl RNA nucleotides
  modified_base order(2,4,6,8,10,12,14,16,18): mod_base = OTHER; note = 2-prime deoxy-2-prime-F RNA nucleotides
  modified_base 1^2: mod_base = OTHER; note = Phosphorothioate
  modified_base 2^3: mod_base = OTHER; note = Phosphorothioate
  modified_base 17^18: mod_base = OTHER; note = Phosphorothioate
  modified_base 18^19: mod_base = OTHER; note = Phosphorothioate
  ncRNA 1..19: ncRNA_class = siRNA
ctaatatcaggacttgcca

SEQ ID NO: 761 - RNA, 19 nt, synthetic construct
  source 1..19: mol_type = other RNA
  modified_base order(1..6,10..19): mod_base = OTHER; note = 2-prime-O-Methyl RNA nucleotides
  modified_base 7..9: mod_base = OTHER; note = 2-prime deoxy-2-prime-F RNA nucleotides
  modified_base 1^2: mod_base = OTHER; note = Phosphorothioate
  modified_base 2^3: mod_base = OTHER; note = Phosphorothioate
  modified_base 17^18: mod_base = OTHER; note = Phosphorothioate
  modified_base 18^19: mod_base = OTHER; note = Phosphorothioate
  ncRNA 1..19: ncRNA_class = siRNA
tggcaagtcctgatattag

SEQ ID NO: 762 - RNA, 19 nt, synthetic construct
  source 1..19: mol_type = other RNA
  modified_base order(1,3,5,7,9,11,13,15,17,19): mod_base = OTHER; note = 2-prime-O-Methyl RNA nucleotides
  modified_base order(2,4,6,8,10,12,14,16,18): mod_base = OTHER; note = 2-prime deoxy-2-prime-F RNA nucleotides
  modified_base 1^2: mod_base = OTHER; note = Phosphorothioate
  modified_base 2^3: mod_base = OTHER; note = Phosphorothioate
  modified_base 17^18: mod_base = OTHER; note = Phosphorothioate
  modified_base 18^19: mod_base = OTHER; note = Phosphorothioate
  ncRNA 1..19: ncRNA_class = siRNA
tctgtgacaaaggtgatgg

SEQ ID NO: 763 - RNA, 19 nt, synthetic construct
  source 1..19: mol_type = other RNA
  modified_base order(1..6,10..19): mod_base = OTHER; note = 2-prime-O-Methyl RNA nucleotides
  modified_base 7..9: mod_base = OTHER; note = 2-prime deoxy-2-prime-F RNA nucleotides
  modified_base 1^2: mod_base = OTHER; note = Phosphorothioate
  modified_base 2^3: mod_base = OTHER; note = Phosphorothioate
  modified_base 17^18: mod_base = OTHER; note = Phosphorothioate
  modified_base 18^19: mod_base = OTHER; note = Phosphorothioate
  ncRNA 1..19: ncRNA_class = siRNA
ccatcacctttgtcacaga

SEQ ID NO: 764 - RNA, 19 nt, synthetic construct
  source 1..19: mol_type = other RNA
  modified_base order(1,3,5,7,9,11,13,15,17,19): mod_base = OTHER; note = 2-prime-O-Methyl RNA nucleotides
  modified_base order(2,4,6,8,10,12,14,16,18): mod_base = OTHER; note = 2-prime deoxy-2-prime-F RNA nucleotides
  modified_base 1^2: mod_base = OTHER; note = Phosphorothioate
  modified_base 2^3: mod_base = OTHER; note = Phosphorothioate
  modified_base 17^18: mod_base = OTHER; note = Phosphorothioate
  modified_base 18^19: mod_base = OTHER; note = Phosphorothioate
  ncRNA 1..19: ncRNA_class = siRNA
tttcatatgcagcagtaca

SEQ ID NO: 765 - RNA, 19 nt, synthetic construct
  source 1..19: mol_type = other RNA
  modified_base order(1..6,10..19): mod_base = OTHER; note = 2-prime-O-Methyl RNA nucleotides
  modified_base 7..9: mod_base = OTHER; note = 2-prime deoxy-2-prime-F RNA nucleotides
  modified_base 1^2: mod_base = OTHER; note = Phosphorothioate
  modified_base 2^3: mod_base = OTHER; note = Phosphorothioate
  modified_base 17^18: mod_base = OTHER; note = Phosphorothioate
  modified_base 18^19: mod_base = OTHER; note = Phosphorothioate
  ncRNA 1..19: ncRNA_class = siRNA
tgtactgctgcatatgaaa

SEQ ID NO: 766 - RNA, 19 nt, synthetic construct
  source 1..19: mol_type = other RNA
  modified_base order(1,3,5,7,9,11,13,15,17,19): mod_base = OTHER; note = 2-prime-O-Methyl RNA nucleotides
  modified_base order(2,4,6,8,10,12,14,16,18): mod_base = OTHER; note = 2-prime deoxy-2-prime-F RNA nucleotides
  modified_base 1^2: mod_base = OTHER; note = Phosphorothioate
  modified_base 2^3: mod_base = OTHER; note = Phosphorothioate
  modified_base 17^18: mod_base = OTHER; note = Phosphorothioate
  modified_base 18^19: mod_base = OTHER; note = Phosphorothioate
  ncRNA 1..19: ncRNA_class = siRNA
aagacctggccggagcaca

SEQ ID NO: 767 - RNA, 19 nt, synthetic construct
  source 1..19: mol_type = other RNA
  modified_base order(1..6,10..19): mod_base = OTHER; note = 2-prime-O-Methyl RNA nucleotides
  modified_base 7..9: mod_base = OTHER; note = 2-prime deoxy-2-prime-F RNA nucleotides
  modified_base 1^2: mod_base = OTHER; note = Phosphorothioate
  modified_base 2^3: mod_base = OTHER; note = Phosphorothioate
  modified_base 17^18: mod_base = OTHER; note = Phosphorothioate
  modified_base 18^19: mod_base = OTHER; note = Phosphorothioate
  ncRNA 1..19: ncRNA_class = siRNA
tgtgctccggccaggtctt

SEQ ID NO: 768 - RNA, 19 nt, synthetic construct
  source 1..19: mol_type = other RNA
  modified_base order(1,3,5,7,9,11,13,15,17,19): mod_base = OTHER; note = 2-prime-O-Methyl RNA nucleotides
  modified_base order(2,4,6,8,10,12,14,16,18): mod_base = OTHER; note = 2-prime deoxy-2-prime-F RNA nucleotides
  modified_base 1^2: mod_base = OTHER; note = Phosphorothioate
  modified_base 2^3: mod_base = OTHER; note = Phosphorothioate
  modified_base 17^18: mod_base = OTHER; note = Phosphorothioate
  modified_base 18^19: mod_base = OTHER; note = Phosphorothioate
  ncRNA 1..19: ncRNA_class = siRNA
tcatggtgtgcccgtccag

SEQ ID NO: 769 - RNA, 19 nt, synthetic construct
  source 1..19: mol_type = other RNA
  modified_base order(1..6,10..19): mod_base = OTHER; note = 2-prime-O-Methyl RNA nucleotides
  modified_base 7..9: mod_base = OTHER; note = 2-prime deoxy-2-prime-F RNA nucleotides
  modified_base 1^2: mod_base = OTHER; note = Phosphorothioate
  modified_base 2^3: mod_base = OTHER; note = Phosphorothioate
  modified_base 17^18: mod_base = OTHER; note = Phosphorothioate
  modified_base 18^19: mod_base = OTHER; note = Phosphorothioate
  ncRNA 1..19: ncRNA_class = siRNA
ctggacgggcacaccatga

SEQ ID NO: 770 - RNA, 19 nt, synthetic construct
  source 1..19: mol_type = other RNA
  modified_base order(1,3,5,7,9,11,13,15,17,19): mod_base = OTHER; note = 2-prime-O-Methyl RNA nucleotides
  modified_base order(2,4,6,8,10,12,14,16,18): mod_base = OTHER; note = 2-prime deoxy-2-prime-F RNA nucleotides
  modified_base 1^2: mod_base = OTHER; note = Phosphorothioate
  modified_base 2^3: mod_base = OTHER; note = Phosphorothioate
  modified_base 17^18: mod_base = OTHER; note = Phosphorothioate
  modified_base 18^19: mod_base = OTHER; note = Phosphorothioate
  ncRNA 1..19: ncRNA_class = siRNA
gaaggtaatgtccaggctg

SEQ ID NO: 771 - RNA, 19 nt, synthetic construct
  source 1..19: mol_type = other RNA
  modified_base order(1..6,10..19): mod_base = OTHER; note = 2-prime-O-Methyl RNA nucleotides
  modified_base 7..9: mod_base = OTHER; note = 2-prime deoxy-2-prime-F RNA nucleotides
  modified_base 1^2: mod_base = OTHER; note = Phosphorothioate
  modified_base 2^3: mod_base = OTHER; note = Phosphorothioate
  modified_base 17^18: mod_base = OTHER; note = Phosphorothioate
  modified_base 18^19: mod_base = OTHER; note = Phosphorothioate
  ncRNA 1..19: ncRNA_class = siRNA
cagcctggacattaccttc

SEQ ID NO: 772 - RNA, 19 nt, synthetic construct
  source 1..19: mol_type = other RNA
  modified_base order(1,3,5,7,9,11,13,15,17,19): mod_base = OTHER; note = 2-prime-O-Methyl RNA nucleotides
  modified_base order(2,4,6,8,10,12,14,16,18): mod_base = OTHER; note = 2-prime deoxy-2-prime-F RNA nucleotides
  modified_base 1^2: mod_base = OTHER; note = Phosphorothioate
  modified_base 2^3: mod_base = OTHER; note = Phosphorothioate
  modified_base 17^18: mod_base = OTHER; note = Phosphorothioate
  modified_base 18^19: mod_base = OTHER; note = Phosphorothioate
  ncRNA 1..19: ncRNA_class = siRNA
aagtcgtactcgcagaggt

SEQ ID NO: 773 - RNA, 19 nt, synthetic construct
  source 1..19: mol_type = other RNA
  modified_base order(1..6,10..19): mod_base = OTHER; note = 2-prime-O-Methyl RNA nucleotides
  modified_base 7..9: mod_base = OTHER; note = 2-prime deoxy-2-prime-F RNA nucleotides
  modified_base 1^2: mod_base = OTHER; note = Phosphorothioate
  modified_base 2^3: mod_base = OTHER; note = Phosphorothioate
  modified_base 17^18: mod_base = OTHER; note = Phosphorothioate
  modified_base 18^19: mod_base = OTHER; note = Phosphorothioate
  ncRNA 1..19: ncRNA_class = siRNA
acctctgcgagtacgactt

SEQ ID NO: 774 - RNA, 19 nt, synthetic construct
  source 1..19: mol_type = other RNA
  modified_base order(1,3,5,7,9,11,13,15,17,19): mod_base = OTHER; note = 2-prime-O-Methyl RNA nucleotides
  modified_base order(2,4,6,8,10,12,14,16,18): mod_base = OTHER; note = 2-prime deoxy-2-prime-F RNA nucleotides
  modified_base 17^18: mod_base = OTHER; note = Phosphorothioate
  modified_base 18^19: mod_base = OTHER; note = Phosphorothioate
  ncRNA 1..19: ncRNA_class = siRNA
ttgggtgaagtagaggcgc

SEQ ID NO: 775 - RNA, 19 nt, synthetic construct
  source 1..19: mol_type = other RNA
  modified_base order(1..6,10..19): mod_base = OTHER; note = 2-prime-O-Methyl RNA nucleotides
  modified_base 7..9: mod_base = OTHER; note = 2-prime deoxy-2-prime-F RNA nucleotides
  modified_base 17^18: mod_base = OTHER; note = Phosphorothioate
  modified_base 18^19: mod_base = OTHER; note = Phosphorothioate
  ncRNA 1..19: ncRNA_class = siRNA
gcgcctctacttcacccac

SEQ ID NO: 776 - RNA, 19 nt, synthetic construct
  source 1..19: mol_type = other RNA
  modified_base order(1,3,5,7,9,11,13,15,17,19): mod_base = OTHER; note = 2-prime-O-Methyl RNA nucleotides
  modified_base order(2,4,6,8,10,12,14,16,18): mod_base = OTHER; note = 2-prime deoxy-2-prime-F RNA nucleotides
  modified_base 17^18: mod_base = OTHER; note = Phosphorothioate
  modified_base 18^19: mod_base = OTHER; note = Phosphorothioate
  ncRNA 1..19: ncRNA_class = siRNA
tacgaagtcgtactcgcag

SEQ ID NO: 777 - RNA, 19 nt, synthetic construct
  source 1..19: mol_type = other RNA
  modified_base order(1..6,10..19): mod_base = OTHER; note = 2-prime-O-Methyl RNA nucleotides
  modified_base 7..9: mod_base = OTHER; note = 2-prime deoxy-2-prime-F RNA nucleotides
  modified_base 17^18: mod_base = OTHER; note = Phosphorothioate
  modified_base 18^19: mod_base = OTHER; note = Phosphorothioate
  ncRNA 1..19: ncRNA_class = siRNA
ctgcgagtacgacttcgtc

SEQ ID NO: 778 - RNA, 19 nt, synthetic construct
  source 1..19: mol_type = other RNA
  modified_base order(1,3,5,7,9,11,13,15,17,19): mod_base = OTHER; note = 2-prime-O-Methyl RNA nucleotides
  modified_base order(2,4,6,8,10,12,14,16,18): mod_base = OTHER; note = 2-prime deoxy-2-prime-F RNA nucleotides
  modified_base 17^18: mod_base = OTHER; note = Phosphorothioate
  modified_base 18^19: mod_base = OTHER; note = Phosphorothioate
  ncRNA 1..19: ncRNA_class = siRNA
ttagaaggcctcgaacccc

SEQ ID NO: 779 - RNA, 19 nt, synthetic construct
  source 1..19: mol_type = other RNA
  modified_base order(1..6,10..19): mod_base = OTHER; note = 2-prime-O-Methyl RNA nucleotides
  modified_base 7..9: mod_base = OTHER; note = 2-prime deoxy-2-prime-F RNA nucleotides
  modified_base 17^18: mod_base = OTHER; note = Phosphorothioate
  modified_base 18^19: mod_base = OTHER; note = Phosphorothioate
  ncRNA 1..19: ncRNA_class = siRNA
ggggttcgaggccttctat

SEQ ID NO: 780 - RNA, 19 nt, synthetic construct
  source 1..19: mol_type = other RNA
  modified_base order(1,3,5,7,9,11,13,15,17,19): mod_base = OTHER; note = 2-prime-O-Methyl RNA nucleotides
  modified_base order(2,4,6,8,10,12,14,16,18): mod_base = OTHER; note = 2-prime deoxy-2-prime-F RNA nucleotides
  modified_base 17^18: mod_base = OTHER; note = Phosphorothioate
  modified_base 18^19: mod_base = OTHER; note = Phosphorothioate
  ncRNA 1..19: ncRNA_class = siRNA
taaggtaatgtccaggctg

SEQ ID NO: 781 - RNA, 19 nt, synthetic construct
  source 1..19: mol_type = other RNA
  modified_base order(1..6,10..19): mod_base = OTHER; note = 2-prime-O-Methyl RNA nucleotides
  modified_base 7..9: mod_base = OTHER; note = 2-prime deoxy-2-prime-F RNA nucleotides
  modified_base 17^18: mod_base = OTHER; note = Phosphorothioate
  modified_base 18^19: mod_base = OTHER; note = Phosphorothioate
  ncRNA 1..19: ncRNA_class = siRNA
cagcctggacattaccttc

SEQ ID NO: 782 - RNA, 19 nt, synthetic construct
  source 1..19: mol_type = other RNA
  modified_base order(1,3,5,7,9,11,13,15,17,19): mod_base = OTHER; note = 2-prime-O-Methyl RNA nucleotides
  modified_base order(2,4,6,8,10,12,14,16,18): mod_base = OTHER; note = 2-prime deoxy-2-prime-F RNA nucleotides
  modified_base 17^18: mod_base = OTHER; note = Phosphorothioate
  modified_base 18^19: mod_base = OTHER; note = Phosphorothioate
  ncRNA 1..19: ncRNA_class = siRNA
tagtcgtactcgcagaggt

SEQ ID NO: 783 - RNA, 19 nt, synthetic construct
  source 1..19: mol_type = other RNA
  modified_base order(1..6,10..19): mod_base = OTHER; note = 2-prime-O-Methyl RNA nucleotides
  modified_base 7..9: mod_base = OTHER; note = 2-prime deoxy-2-prime-F RNA nucleotides
  modified_base 17^18: mod_base = OTHER; note = Phosphorothioate
  modified_base 18^19: mod_base = OTHER; note = Phosphorothioate
  ncRNA 1..19: ncRNA_class = siRNA
acctctgcgagtacgactt

SEQ ID NO: 784 - RNA, 19 nt, synthetic construct
  source 1..19: mol_type = other RNA
  modified_base order(1..6,10..19): mod_base = OTHER; note = 2-prime-O-Methyl RNA nucleotides
  modified_base 7..9: mod_base = OTHER; note = 2-prime deoxy-2-prime-F RNA nucleotides
  modified_base 17^18: mod_base = OTHER; note = Phosphorothioate
  modified_base 18^19: mod_base = OTHER; note = Phosphorothioate
  ncRNA 1..19: ncRNA_class = siRNA
tccgactactccaacgaga

SEQ ID NO: 785 - RNA, 19 nt, synthetic construct
  source 1..19: mol_type = other RNA
  modified_base order(1..6,10..19): mod_base = OTHER; note = 2-prime-O-Methyl RNA nucleotides
  modified_base 7..9: mod_base = OTHER; note = 2-prime deoxy-2-prime-F RNA nucleotides
  modified_base 17^18: mod_base = OTHER; note = Phosphorothioate
  modified_base 18^19: mod_base = OTHER; note = Phosphorothioate
  ncRNA 1..19: ncRNA_class = siRNA
gcgcctctacttcacccac

SEQ ID NO: 786 - RNA, 19 nt, synthetic construct
  source 1..19: mol_type = other RNA
  modified_base order(1..6,10..19): mod_base = OTHER; note = 2-prime-O-Methyl RNA nucleotides
  modified_base 7..9: mod_base = OTHER; note = 2-prime deoxy-2-prime-F RNA nucleotides
  modified_base 17^18: mod_base = OTHER; note = Phosphorothioate
  modified_base 18^19: mod_base = OTHER; note = Phosphorothioate
  ncRNA 1..19: ncRNA_class = siRNA
tccgctccgactactccaa

SEQ ID NO: 787 - RNA, 19 nt, synthetic construct
  source 1..19: mol_type = other RNA
  modified_base order(1..6,10..19): mod_base = OTHER; note = 2-prime-O-Methyl RNA nucleotides
  modified_base 7..9: mod_base = OTHER; note = 2-prime deoxy-2-prime-F RNA nucleotides
  modified_base 17^18: mod_base = OTHER; note = Phosphorothioate
  modified_base 18^19: mod_base = OTHER; note = Phosphorothioate
  ncRNA 1..19: ncRNA_class = siRNA
gcgagtacgacttcgtcaa

SEQ ID NO: 788 - RNA, 19 nt, synthetic construct
  source 1..19: mol_type = other RNA
  modified_base order(1..6,10..19): mod_base = OTHER; note = 2-prime-O-Methyl RNA nucleotides
  modified_base 7..9: mod_base = OTHER; note = 2-prime deoxy-2-prime-F RNA nucleotides
  modified_base 17^18: mod_base = OTHER; note = Phosphorothioate
  modified_base 18^19: mod_base = OTHER; note = Phosphorothioate
  ncRNA 1..19: ncRNA_class = siRNA
ttaccttccgctccgacta

SEQ ID NO: 789 - RNA, 19 nt, synthetic construct
  source 1..19: mol_type = other RNA
  modified_base order(1..6,10..19): mod_base = OTHER; note = 2-prime-O-Methyl RNA nucleotides
  modified_base 7..9: mod_base = OTHER; note = 2-prime deoxy-2-prime-F RNA nucleotides
  modified_base 17^18: mod_base = OTHER; note = Phosphorothioate
  modified_base 18^19: mod_base = OTHER; note = Phosphorothioate
  ncRNA 1..19: ncRNA_class = siRNA
acattaccttccgctccga

SEQ ID NO: 790 - RNA, 19 nt, synthetic construct
  source 1..19: mol_type = other RNA
  modified_base order(1..6,10..19): mod_base = OTHER; note = 2-prime-O-Methyl RNA nucleotides
  modified_base 7..9: mod_base = OTHER; note = 2-prime deoxy-2-prime-F RNA nucleotides
  modified_base 17^18: mod_base = OTHER; note = Phosphorothioate
  modified_base 18^19: mod_base = OTHER; note = Phosphorothioate
  ncRNA 1..19: ncRNA_class = siRNA
ctgcgagtacgacttcgtc

SEQ ID NO: 791 - RNA, 19 nt, synthetic construct
  source 1..19: mol_type = other RNA
  modified_base order(1..6,10..19): mod_base = OTHER; note = 2-prime-O-Methyl RNA nucleotides
  modified_base 7..9: mod_base = OTHER; note = 2-prime deoxy-2-prime-F RNA nucleotides
  modified_base 17^18: mod_base = OTHER; note = Phosphorothioate
  modified_base 18^19: mod_base = OTHER; note = Phosphorothioate
  ncRNA 1..19: ncRNA_class = siRNA
ggggttcgaggccttctat

SEQ ID NO: 792 - RNA, 19 nt, synthetic construct
  source 1..19: mol_type = other RNA
  modified_base order(1..6,10..19): mod_base = OTHER; note = 2-prime-O-Methyl RNA nucleotides
  modified_base 7..9: mod_base = OTHER; note = 2-prime deoxy-2-prime-F RNA nucleotides
  modified_base 17^18: mod_base = OTHER; note = Phosphorothioate
  modified_base 18^19: mod_base = OTHER; note = Phosphorothioate
  ncRNA 1..19: ncRNA_class = siRNA
cagcctggacattaccttc

SEQ ID NO: 793 - RNA, 19 nt, synthetic construct
  source 1..19: mol_type = other RNA
  modified_base order(1..6,10..19): mod_base = OTHER; note = 2-prime-O-Methyl RNA nucleotides
  modified_base 7..9: mod_base = OTHER; note = 2-prime deoxy-2-prime-F RNA nucleotides
  modified_base 17^18: mod_base = OTHER; note = Phosphorothioate
  modified_base 18^19: mod_base = OTHER; note = Phosphorothioate
  ncRNA 1..19: ncRNA_class = siRNA
acctctgcgagtacgactt

SEQ ID NO: 794 - RNA, 19 nt, synthetic construct
  source 1..19: mol_type = other RNA
  modified_base order(1,3,5,7,9,11,13,15,17,19): mod_base = OTHER; note = 2-prime-O-Methyl RNA nucleotides
  modified_base order(2,4,6,8,10,12,14,16,18): mod_base = OTHER; note = 2-prime deoxy-2-prime-F RNA nucleotides
  modified_base 17^18: mod_base = OTHER; note = Phosphorothioate
  modified_base 18^19: mod_base = OTHER; note = Phosphorothioate
  ncRNA 1..19: ncRNA_class = siRNA
tctcgttggagtagtcgga

SEQ ID NO: 795 - RNA, 19 nt, synthetic construct
  source 1..19: mol_type = other RNA
  modified_base order(1..6,10..19): mod_base = OTHER; note = 2-prime-O-Methyl RNA nucleotides
  modified_base 7..9: mod_base = OTHER; note = 2-prime deoxy-2-prime-F RNA nucleotides
  modified_base 17^18: mod_base = OTHER; note = Phosphorothioate
  modified_base 18^19: mod_base = OTHER; note = Phosphorothioate
  ncRNA 1..19: ncRNA_class = siRNA
tccgactactccaacgaga

SEQ ID NO: 796 - RNA, 19 nt, synthetic construct
  source 1..19: mol_type = other RNA
  modified_base order(1,3,5,7,9,11,13,15,17,19): mod_base = OTHER; note = 2-prime-O-Methyl RNA nucleotides
  modified_base order(2,4,6,8,10,12,14,16,18): mod_base = OTHER; note = 2-prime deoxy-2-prime-F RNA nucleotides
  modified_base 17^18: mod_base = OTHER; note = Phosphorothioate
  modified_base 18^19: mod_base = OTHER; note = Phosphorothioate
  ncRNA 1..19: ncRNA_class = siRNA
ttgggtgaagtagaggcgc

SEQ ID NO: 797 - RNA, 19 nt, synthetic construct
  source 1..19: mol_type = other RNA
  modified_base order(1..6,10..19): mod_base = OTHER; note = 2-prime-O-Methyl RNA nucleotides
  modified_base 7..9: mod_base = OTHER; note = 2-prime deoxy-2-prime-F RNA nucleotides
  modified_base 17^18: mod_base = OTHER; note = Phosphorothioate
  modified_base 18^19: mod_base = OTHER; note = Phosphorothioate
  ncRNA 1..19: ncRNA_class = siRNA
gcgcctctacttcacccac

SEQ ID NO: 798 - RNA, 19 nt, synthetic construct
  source 1..19: mol_type = other RNA
  modified_base order(1..6,10..19): mod_base = OTHER; note = 2-prime-O-Methyl RNA nucleotides
  modified_base 7..9: mod_base = OTHER; note = 2-prime deoxy-2-prime-F RNA nucleotides
  modified_base 17^18: mod_base = OTHER; note = Phosphorothioate
  modified_base 18^19: mod_base = OTHER; note = Phosphorothioate
  ncRNA 1..19: ncRNA_class = siRNA
ttggagtagtcggagcgga

SEQ ID NO: 799 - RNA, 19 nt, synthetic construct
  source 1..19: mol_type = other RNA
  modified_base order(1..6,10..19): mod_base = OTHER; note = 2-prime-O-Methyl RNA nucleotides
  modified_base 7..9: mod_base = OTHER; note = 2-prime deoxy-2-prime-F RNA nucleotides
  modified_base 17^18: mod_base = OTHER; note = Phosphorothioate
  modified_base 18^19: mod_base = OTHER; note = Phosphorothioate
  ncRNA 1..19: ncRNA_class = siRNA
tccgctccgactactccaa

SEQ ID NO: 800 - RNA, 19 nt, synthetic construct
  source 1..19: mol_type = other RNA
  modified_base order(1,3,5,7,9,11,13,15,17,19): mod_base = OTHER; note = 2-prime-O-Methyl RNA nucleotides
  modified_base order(2,4,6,8,10,12,14,16,18): mod_base = OTHER; note = 2-prime deoxy-2-prime-F RNA nucleotides
  modified_base 17^18: mod_base = OTHER; note = Phosphorothioate
  modified_base 18^19: mod_base = OTHER; note = Phosphorothioate
  ncRNA 1..19: ncRNA_class = siRNA
ttgacgaagtcgtactcgc

SEQ ID NO: 801 - RNA, 19 nt, synthetic construct
  source 1..19: mol_type = other RNA
  modified_base order(1..6,10..19): mod_base = OTHER; note = 2-prime-O-Methyl RNA nucleotides
  modified_base 7..9: mod_base = OTHER; note = 2-prime deoxy-2-prime-F RNA nucleotides
  modified_base 17^18: mod_base = OTHER; note = Phosphorothioate
  modified_base 18^19: mod_base = OTHER; note = Phosphorothioate
  ncRNA 1..19: ncRNA_class = siRNA
gcgagtacgacttcgtcaa

SEQ ID NO: 802 - RNA, 19 nt, synthetic construct
  source 1..19: mol_type = other RNA
  modified_base order(1,3,5,7,9,11,13,15,17,19): mod_base = OTHER; note = 2-prime-O-Methyl RNA nucleotides
  modified_base order(2,4,6,8,10,12,14,16,18): mod_base = OTHER; note = 2-prime deoxy-2-prime-F RNA nucleotides
  modified_base 17^18: mod_base = OTHER; note = Phosphorothioate
  modified_base 18^19: mod_base = OTHER; note = Phosphorothioate
  ncRNA 1..19: ncRNA_class = siRNA
tagtcggagcggaaggtaa

SEQ ID NO: 803 - RNA, 19 nt, synthetic construct
  source 1..19: mol_type = other RNA
  modified_base order(1..6,10..19): mod_base = OTHER; note = 2-prime-O-Methyl RNA nucleotides
  modified_base 7..9: mod_base = OTHER; note = 2-prime deoxy-2-prime-F RNA nucleotides
  modified_base 17^18: mod_base = OTHER; note = Phosphorothioate
  modified_base 18^19: mod_base = OTHER; note = Phosphorothioate
  ncRNA 1..19: ncRNA_class = siRNA
ttaccttccgctccgacta

SEQ ID NO: 804 - RNA, 19 nt, synthetic construct
  source 1..19: mol_type = other RNA
  modified_base order(1,3,5,7,9,11,13,15,17,19): mod_base = OTHER; note = 2-prime-O-Methyl RNA nucleotides
  modified_base order(2,4,6,8,10,12,14,16,18): mod_base = OTHER; note = 2-prime deoxy-2-prime-F RNA nucleotides
  modified_base 17^18: mod_base = OTHER; note = Phosphorothioate
  modified_base 18^19: mod_base = OTHER; note = Phosphorothioate
  ncRNA 1..19: ncRNA_class = siRNA
tcggagcggaaggtaatgt

SEQ ID NO: 805 - RNA, 19 nt, synthetic construct
  source 1..19: mol_type = other RNA
  modified_base order(1..6,10..19): mod_base = OTHER; note = 2-prime-O-Methyl RNA nucleotides
  modified_base 7..9: mod_base = OTHER; note = 2-prime deoxy-2-prime-F RNA nucleotides
  modified_base 17^18: mod_base = OTHER; note = Phosphorothioate
  modified_base 18^19: mod_base = OTHER; note = Phosphorothioate
  ncRNA 1..19: ncRNA_class = siRNA
acattaccttccgctccga

SEQ ID NO: 806 - RNA, 19 nt, synthetic construct
  source 1..19: mol_type = other RNA
  modified_base order(1,3,5,7,9,11,13,15,17,19): mod_base = OTHER; note = 2-prime-O-Methyl RNA nucleotides
  modified_base order(2,4,6,8,10,12,14,16,18): mod_base = OTHER; note = 2-prime deoxy-2-prime-F RNA nucleotides
  modified_base 17^18: mod_base = OTHER; note = Phosphorothioate
  modified_base 18^19: mod_base = OTHER; note = Phosphorothioate
  ncRNA 1..19: ncRNA_class = siRNA
tacgaagtcgtactcgcag

SEQ ID NO: 807 - RNA, 19 nt, synthetic construct
  source 1..19: mol_type = other RNA
  modified_base order(1..6,10..19): mod_base = OTHER; note = 2-prime-O-Methyl RNA nucleotides
  modified_base 7..9: mod_base = OTHER; note = 2-prime deoxy-2-prime-F RNA nucleotides
  modified_base 17^18: mod_base = OTHER; note = Phosphorothioate
  modified_base 18^19: mod_base = OTHER; note = Phosphorothioate
  ncRNA 1..19: ncRNA_class = siRNA
ctgcgagtacgacttcgtc

SEQ ID NO: 808 - RNA, 19 nt, synthetic construct
  source 1..19: mol_type = other RNA
  modified_base order(1,3,5,7,9,11,13,15,17,19): mod_base = OTHER; note = 2-prime-O-Methyl RNA nucleotides
  modified_base order(2,4,6,8,10,12,14,16,18): mod_base = OTHER; note = 2-prime deoxy-2-prime-F RNA nucleotides
  modified_base 17^18: mod_base = OTHER; note = Phosphorothioate
  modified_base 18^19: mod_base = OTHER; note = Phosphorothioate
  ncRNA 1..19: ncRNA_class = siRNA
ttagaaggcctcgaacccc

SEQ ID NO: 809 - RNA, 19 nt, synthetic construct
  source 1..19: mol_type = other RNA
  modified_base order(1..6,10..19): mod_base = OTHER; note = 2-prime-O-Methyl RNA nucleotides
  modified_base 7..9: mod_base = OTHER; note = 2-prime deoxy-2-prime-F RNA nucleotides
  modified_base 17^18: mod_base = OTHER; note = Phosphorothioate
  modified_base 18^19: mod_base = OTHER; note = Phosphorothioate
  ncRNA 1..19: ncRNA_class = siRNA
ggggttcgaggccttctat

SEQ ID NO: 810 - RNA, 19 nt, synthetic construct
  source 1..19: mol_type = other RNA
  modified_base order(1,3,5,7,9,11,13,15,17,19): mod_base = OTHER; note = 2-prime-O-Methyl RNA nucleotides
  modified_base order(2,4,6,8,10,12,14,16,18): mod_base = OTHER; note = 2-prime deoxy-2-prime-F RNA nucleotides
  modified_base 17^18: mod_base = OTHER; note = Phosphorothioate
  modified_base 18^19: mod_base = OTHER; note = Phosphorothioate
  ncRNA 1..19: ncRNA_class = siRNA
taaggtaatgtccaggctg

SEQ ID NO: 811 - RNA, 19 nt, synthetic construct
  source 1..19: mol_type = other RNA
  modified_base order(1..6,10..19): mod_base = OTHER; note = 2-prime-O-Methyl RNA nucleotides
  modified_base 7..9: mod_base = OTHER; note = 2-prime deoxy-2-prime-F RNA nucleotides
  modified_base 17^18: mod_base = OTHER; note = Phosphorothioate
  modified_base 18^19: mod_base = OTHER; note = Phosphorothioate
  ncRNA 1..19: ncRNA_class = siRNA
cagcctggacattaccttc

SEQ ID NO: 812 - RNA, 19 nt, synthetic construct
  source 1..19: mol_type = other RNA
  modified_base order(1,3,5,7,9,11,13,15,17,19): mod_base = OTHER; note = 2-prime-O-Methyl RNA nucleotides
  modified_base order(2,4,6,8,10,12,14,16,18): mod_base = OTHER; note = 2-prime deoxy-2-prime-F RNA nucleotides
  modified_base 17^18: mod_base = OTHER; note = Phosphorothioate
  modified_base 18^19: mod_base = OTHER; note = Phosphorothioate
  ncRNA 1..19: ncRNA_class = siRNA
tagtcgtactcgcagaggt

SEQ ID NO: 813 - RNA, 19 nt, synthetic construct
  source 1..19: mol_type = other RNA
  modified_base order(1..6,10..19): mod_base = OTHER; note = 2-prime-O-Methyl RNA nucleotides
  modified_base 7..9: mod_base = OTHER; note = 2-prime deoxy-2-prime-F RNA nucleotides
  modified_base 17^18: mod_base = OTHER; note = Phosphorothioate
  modified_base 18^19: mod_base = OTHER; note = Phosphorothioate
  ncRNA 1..19: ncRNA_class = siRNA
acctctgcgagtacgactt

SEQ ID NO: 814 - RNA, 19 nt, synthetic construct
  source 1..19: mol_type = other RNA
  modified_base order(1,3,5,7,9,11,13,15,17,19): mod_base = OTHER; note = 2-prime-O-Methyl RNA nucleotides
  modified_base order(2,4,6,8,10,12,14,16,18): mod_base = OTHER; note = 2-prime deoxy-2-prime-F RNA nucleotides
  modified_base 1^2: mod_base = OTHER; note = Phosphorothioate
  modified_base 2^3: mod_base = OTHER; note = Phosphorothioate
  modified_base 17^18: mod_base = OTHER; note = Phosphorothioate
  modified_base 18^19: mod_base = OTHER; note = Phosphorothioate
  ncRNA 1..19: ncRNA_class = siRNA
tggcagacaaataggcgtg

SEQ ID NO: 815 - RNA, 19 nt, synthetic construct
  source 1..19: mol_type = other RNA
  modified_base order(1..6,10..19): mod_base = OTHER; note = 2-prime-O-Methyl RNA nucleotides
  modified_base 7..9: mod_base = OTHER; note = 2-prime deoxy-2-prime-F RNA nucleotides
  modified_base 17^18: mod_base = OTHER; note = Phosphorothioate
  modified_base 18^19: mod_base = OTHER; note = Phosphorothioate
  ncRNA 1..19: ncRNA_class = siRNA
cacgcctatttgtctgcca

SEQ ID NO: 816 - RNA, 19 nt, synthetic construct
  source 1..19: mol_type = other RNA
  modified_base order(1..6,10..19): mod_base = OTHER; note = 2-prime-O-Methyl RNA nucleotides
  modified_base 7..9: mod_base = OTHER; note = 2-prime deoxy-2-prime-F RNA nucleotides
  modified_base 17^18: mod_base = OTHER; note = Phosphorothioate
  modified_base 18^19: mod_base = OTHER; note = Phosphorothioate
  ncRNA 1..19: ncRNA_class = siRNA
tccgactactccaacgaga

SEQ ID NO: 817 - RNA, 19 nt, synthetic construct
  source 1..19: mol_type = other RNA
  modified_base order(1..6,10..19): mod_base = OTHER; note = 2-prime-O-Methyl RNA nucleotides
  modified_base 7..9: mod_base = OTHER; note = 2-prime deoxy-2-prime-F RNA nucleotides
  modified_base 17^18: mod_base = OTHER; note = Phosphorothioate
  modified_base 18^19: mod_base = OTHER; note = Phosphorothioate
  ncRNA 1..19: ncRNA_class = siRNA
tccgctccgactactccaa

SEQ ID NO: 818 - RNA, 19 nt, synthetic construct
  source 1..19: mol_type = other RNA
  modified_base order(1..6,10..19): mod_base = OTHER; note = 2-prime-O-Methyl RNA nucleotides
  modified_base 7..9: mod_base = OTHER; note = 2-prime deoxy-2-prime-F RNA nucleotides
  modified_base 17^18: mod_base = OTHER; note = Phosphorothioate
  modified_base 18^19: mod_base = OTHER; note = Phosphorothioate
  ncRNA 1..19: ncRNA_class = siRNA
gcgagtacgacttcgtcaa

SEQ ID NO: 819 - RNA, 19 nt, synthetic construct
  source 1..19: mol_type = other RNA
  modified_base order(1..6,10..19): mod_base = OTHER; note = 2-prime-O-Methyl RNA nucleotides
  modified_base 7..9: mod_base = OTHER; note = 2-prime deoxy-2-prime-F RNA nucleotides
  modified_base 17^18: mod_base = OTHER; note = Phosphorothioate
  modified_base 18^19: mod_base = OTHER; note = Phosphorothioate
  ncRNA 1..19: ncRNA_class = siRNA
ttaccttccgctccgacta

SEQ ID NO: 820 - RNA, 19 nt, synthetic construct
  source 1..19: mol_type = other RNA
  modified_base order(1..6,10..19): mod_base = OTHER; note = 2-prime-O-Methyl RNA nucleotides
  modified_base 7..9: mod_base = OTHER; note = 2-prime deoxy-2-prime-F RNA nucleotides
  modified_base 17^18: mod_base = OTHER; note = Phosphorothioate
  modified_base 18^19: mod_base = OTHER; note = Phosphorothioate
  ncRNA 1..19: ncRNA_class = siRNA
acattaccttccgctccga

SEQ ID NO: 821 - RNA, 2455 nt, Homo sapiens
  source 1..2455: mol_type = other RNA
agaccaggccaggccagctggacgggcacaccatgaggctgctgaccctcctgggccttctgtgtggctcggtggccacccccttgggcccgaagtggcctgaacctgtgttcgggcgcctggcatcccccggctttccaggggagtatgccaatgaccaggagcggcgctggaccctgactgcaccccccggctaccgcctgcgcctctacttcacccacttcgacctggagctctcccacctctgcgagtacgacttcgtcaagctgagctcgggggccaaggtgctggccacgctgtgcgggcaggagagcacagacacggagcgggcccctggcaaggacactttctactcgctgggctccagcctggacattaccttccgctccgactactccaacgagaagccgttcacggggttcgaggccttctatgcagccgaggacattgacgagtgccaggtggccccgggagaggcgcccacctgcgaccaccactgccacaaccacctgggcggtttctactgctcctgccgcgcaggctacgtcctgcaccgtaacaagcgcacctgctcagccctgtgctccggccaggtcttcacccagaggtctggggagctcagcagccctgaatacccacggccgtatcccaaactctccagttgcacttacagcatcagcctggaggaggggttcagtgtcattctggactttgtggagtccttcgatgtggagacacaccctgaaaccctgtgtccctacgactttctcaagattcaaacagacagagaagaacatggcccattctgtgggaagacattgccccacaggattgaaacaaaaagcaacacggtgaccatcacctttgtcacagatgaatcaggagaccacacaggctggaagatccactacacgagcacagcgcagccttgcccttatccgatggcgccacctaatggccacgtttcacctgtgcaagccaaatacatcctgaaagacagcttctccatcttttgcgagactggctatgagcttctgcaaggtcacttgcccctgaaatcctttactgcagtttgtcagaaagatggatcttgggaccggccaatgcccgcgtgcagcattgttgactgtggccctcctgatgatctacccagtggccgagtggagtacatcacaggtcctggagtgaccacctacaaagctgtgattcagtacagctgtgaagagaccttctacacaatgaaagtgaatgatggtaaatatgtgtgtgaggctgatggattctggacgagctccaaaggagaaaaatcactcccagtctgtgagcctgtttgtggactatcagcccgcacaacaggagggcgtatatatggagggcaaaaggcaaaacctggtgattttccttggcaagtcctgatattaggtggaaccacagcagcaggtgcacttttatatgacaactgggtcctaacagctgctcatgccgtctatgagcaaaaacatgatgcatccgccctggacattcgaatgggcaccctgaaaagactatcacctcattatacacaagcctggtctgaagctgtttttatacatgaaggttatactcatgatgctggctttgacaatgacatagcactgattaaattgaataacaaagttgtaatcaatagcaacatcacgcctatttgtctgccaagaaaagaagctgaatcctttatgaggacagatgacattggaactgcatctggatggggattaacccaaaggggttttcttgctagaaatctaatgtatgtcgacataccgattgttgaccatcaaaaatgtactgctgcatatgaaaagccaccctatccaaggggaagtgtaactgctaacatgctttgtgctggcttagaaagtgggggcaaggacagctgcagaggtgacagcggaggggcactggtgtttctagatagtgaaacagagaggtggtttgtgggaggaatagtgtcctggggttccatgaattgtggggaagcaggtcagtatggagtctacacaaaagttattaactatattccctggatcgagaacataattagtgatttttaacttgcgtgtctgcagtcaaggattcttcatttttagaaatgcctgtgaagaccttggcagcgacgtggctcgagaagcattcatcattactgtggacatggcagttgttgctccacccaaaaaaacagactccaggtgaggctgctgtcatttctccacttgccagtttaattccagccttacccattgactcaaggggacataaaccacgagagtgacagtcatctttgcccacccagtgtaatgtcactgctcaaattacatttcattaccttaaaaagccagtctcttttcatactggctgttggcatttctgtaaactgcctgtccatgctctttgtttttaaacttgttcttattga

1. A double-stranded nucleic acid for inhibiting expression of MASP-2, wherein the nucleic acid comprises a first strand and a second strand, wherein the unmodified equivalent of the first strand sequence consists of a sequence from any one of the first strand sequences of SEQ ID No. 245, 147, 385, 199, 235, 237, 309, 381, 386, 387, 388, 389, 289.

2. The nucleic acid of claim 1, wherein the unmodified equivalent of the second strand sequence comprises a sequence from any one of the corresponding second strand sequences of SEQ ID No. 246, 148, 178, 200, 236, 238, 310, 346, 382, 384, 290.

3. The nucleic acid of claim 1, wherein the first strand and the second strand form a duplex region of from 17-25 nucleotides in length.

4. The nucleic acid of claim 1, wherein the nucleic acid mediates RNA interference.

5. The nucleic acid of claim 1, wherein the first strand sequence consists of SEQ ID No. 245 and wherein the second strand consists of SEQ ID No. 246.

6. The nucleic acid of claim 5, wherein at least one nucleotide of the first and/or second strand is a modified nucleotide.

7. The nucleic acid of claim 6, wherein the first strand has a terminal 5′ (E)-vinylphosphonate nucleotide at its 5′ end.

8. The nucleic acid of claim 6, wherein the nucleic acid comprises a phosphorothioate linkage between each of the terminal three 3′ nucleotides of the first strand.

9. The nucleic acid of claim 6, wherein the nucleic acid comprises a phosphorothioate linkage between each of the terminal three 3′ nucleotides of the second strand.

10. The nucleic acid of claim 8, wherein the linkages between the remaining nucleotides of the first strand and/or of the second strand are phosphodiester linkages.

11. The nucleic acid of claim 1, wherein the first strand sequence comprises (vp)-mU fC mG fG mA fG mC fG mG fA mA fG mG fU mA fA mU (ps) fG (ps) mU (SEQ ID No. 804) and optionally wherein the second strand sequence comprises mA mC mA mU mU mA fC fC fU mU mC mC mG mC mU mC mC (ps) mG (ps) mA (SEQ ID No. 820).

12. The nucleic acid of claim 1, wherein the nucleic acid is conjugated to a heterologous moiety.

13. The nucleic acid of claim 12, wherein the heterologous moiety comprises (i) one or more N-acetyl galactosamine (GalNAc) moieties or derivatives thereof, and (ii) a linker, wherein the linker conjugates the at least one GalNAc moiety or derivative thereof to the nucleic acid.

14. The nucleic acid of claim 13, wherein the first strand sequence comprises (vp)-mU fC mG fG mA fG mC fG mG fA mA fG mG fU mA fA mU (ps) fG (ps) mU (SEQ ID No. 804) and optionally wherein the second strand sequence comprises [ST23 (ps)]₃ ST41 (ps) mA mC mA mU mU mA fC fC fU mU mC mC mG mC mU mC mC (ps) mG (ps) mA (SEQ ID No. 805).

15. A composition comprising a nucleic acid of claim 1 and a solvent and/or a delivery vehicle and/or a physiologically acceptable excipient and/or a carrier and/or a salt and/or a diluent and/or a buffer and/or a preservative and/or a further therapeutic agent selected from the group comprising an oligonucleotide, a small molecule, a monoclonal antibody, a polyclonal antibody and a peptide.

16. A method of prophylaxis or treatment of a disease, disorder or syndrome comprising administering a pharmaceutically effective dose of a nucleic acid of claim 1 to an individual in need of treatment, wherein the disease, disorder or syndrome is
(a) selected from the group consisting of C3 glomerulopathy (C3G), paroxysmal nocturnal hemoglobinuria (PNH), atypical hemolytic uremic syndrome (aHUS), lupus nephritis, IgA nephropathy (IgA N), cold agglutinin disease (CAD), myasthenia gravis (MG), primary membranous nephropathy, immune complex-mediated glomerulonephritis (IC-mediated GN), post-infectious glomerulonephritis (PIGN), systemic lupus erythematosus (SLE), ischemia/reperfusion injury, age-related macular degeneration (AMD), rheumatoid arthritis (RA), antineutrophil cytoplasmic autoantibodies-associated vasculitis (ANCA-AV), dysbiotic periodontal disease, malarial anaemia, neuromyelitis optica, post-HCT/solid organ transplant (TMAs), Guillain-Barré syndrome, membranous glomerulonephritis, thrombotic thrombocytopenic purpura and sepsis;
(b) selected from the group consisting of C3 glomerulopathy (C3G), paroxysmal nocturnal hemoglobinuria (PNH), atypical hemolytic uremic syndrome (aHUS), lupus nephritis, IgA nephropathy (IgA N) and primary membranous nephropathy;
(c) selected from the group consisting of C3 glomerulopathy (C3G), antineutrophil cytoplasmic autoantibodies-associated vasculitis (ANCA-AV), atypical hemolytic uremic syndrome (aHUS), cold agglutinin disease (CAD), myasthenia gravis (MG), IgA nephropathy (IgA N), paroxysmal nocturnal hemoglobinuria (PNH);
(d) selected from the group consisting of C3 glomerulopathy (C3G), cold agglutinin disease (CAD), myasthenia gravis (MG), neuromyelitis optica, atypical hemolytic uremic syndrome (aHUS), antineutrophil cytoplasmic autoantibodies-associated vasculitis (ANCA-AV), IgA nephropathy (IgA N), post-HCT/Solid Organ Transplant (TMAs), Guillain-Barré syndrome, paroxysmal nocturnal hemoglobinuria (PNH), membranous glomerulonephritis, lupus nephritis and thrombotic thrombocytopenic purpura;
(e) selected from the group consisting of C3 glomerulopathy (C3G), cold agglutinin disease (CAD) and IgA nephropathy (IgA N); or
(f) C3 glomerulopathy (C3G).
